(19) United States
(12) Patent Application Publication
(10) Pub. No.: US 2020/0181720 A1
(43) Pub. Date: Jun. 11, 2020

(54) CRISPR EFFECTOR SYSTEM BASED DIAGNOSTICS FOR VIRUS DETECTION

(71) Applicants: THE BROAD INSTITUTE, INC., Cambridge, MA (US); MASSACHUSETTS INSTITUTE OF TECHNOLOGY, Cambridge, MA (US); PRESIDENT AND FELLOWS OF HARVARD COLLEGE, Cambridge, MA (US)

(72) Inventors: Omar ABUDAYYEH, Cambridge, MA (US); James Joseph COLLINS, Cambridge, MA (US); Jonathan GOOTENBERG, Cambridge, MA (US); Feng ZHANG, Cambridge, MA (US); Eric S. LANDER, Cambridge, MA (US); Pardis SABETI, Cambridge, MA (US); Catherine Amanda FREIJE, Cambridge, MA (US); Cameron MYHRVOLD, Cambridge, MA (US)

(73) Assignees: THE BROAD INSTITUTE, INC., Cambridge, MA (US); MASSACHUSETTS INSTITUTE OF TECHNOLOGY, Cambridge, MA (US); PRESIDENT AND FELLOWS OF HARVARD COLLEGE, Cambridge, MA (US)

(21) Appl. No.: 16/494,279

(22) PCT Filed: Mar. 15, 2018
(86) PCT No.: PCT/US18/22764

§ 371 Date: Sep. 13, 2019

Related U.S. Application Data
(60) Provisional application No. 62/471,931, filed on Mar. 15, 2017.
(60) Provisional application No. 62/484,857, filed on Apr. 12, 2017.
(60) Provisional application No. 62/530,086, filed on Jul. 7, 2017.
(60) Provisional application No. 62/568,315, filed on Oct. 5, 2017.
(60) Provisional application No. 62/588,138, filed on Nov. 17, 2017.
(60) Provisional application No. 62/596,735, filed on Dec. 8, 2017.

(51) Int. Cl. C12Q 1/70; C12Q 1/6851; C12N 15/115

(52) U.S. Cl. CPC C12Q 1/70; C12Q 1/6851; C12N 2310/16; C12Q 2521/301; C12N 2310/20; C12N 15/115

(57) ABSTRACT

Provided herein is a nucleic acid detection system comprising: a CRISPR system comprising an effector protein and one or more guide RNAs designed to bind to corresponding target molecules; an RNA-based masking construct; and optionally, nucleic acid amplification reagents to amplify target RNA molecules in a sample. In another aspect, the embodiments provide a polypeptide detection system comprising: a CRISPR system comprising an effector protein and one or more guide RNAs designed to bind a trigger RNA, an RNA-based masking construct; and one or more detection aptamers comprising a masked RNA polymerase promoter binding site or a masked primer binding site. In some embodiments, the system may be used to detect viruses in samples.

### CROSS REFERENCE TO RELATED APPLICATIONS

[0001] This application is a National Stage application of International Application No. PCT/US2018/022764, filed Mar. 15, 2018, which claims the benefit of U.S. Provisional Application No. 62/471,931 filed Mar. 15, 2017, U.S. Provisional Application 62/484,857 filed Apr. 12, 2017, U.S. Provisional Application 62/530,086 filed Jul. 7, 2017, U.S. Provisional Application 62/568,315 filed Oct. 5, 2017, U.S. Provisional Application U.S. 62/588,138 filed Nov. 17, 2017, and U.S. Provisional Application 62/596,735 filed Dec. 8, 2017. The entire contents of the above-identified applications are hereby fully incorporated herein by reference.

### STATEMENT REGARDING FEDERALLY SPONSORED RESEARCH

[0002] This invention was made with government support under grant numbers MH100706, MH110049, AI110818 granted by the National Institutes of Health, and grant number HDTRA1-14-1-0006 granted by the Defense Threat Reduction Agency. The government has certain rights in the invention.

### TECHNICAL FIELD

[0003] The subject matter disclosed herein is generally directed to rapid diagnostics related to the use of CRISPR effector systems.

### BACKGROUND

[0004] Nucleic acids are a universal signature of biological information. The ability to rapidly detect nucleic acids with high sensitivity and single-base specificity on a portable platform has the potential to revolutionize diagnosis and monitoring for many diseases, provide valuable epidemiological information, and serve as a generalizable scientific tool. Although many methods have been developed for detecting nucleic acids (Du et al., 2017; Green et al., 2014; Kumar et al., 2014; Pardee et al., 2014; Pardee et al., 2016; Urdea et al., 2006), they inevitably suffer from trade-offs among sensitivity, specificity, simplicity, and speed. For example, qPCR approaches are sensitive but are expensive and rely on complex instrumentation, limiting usability to highly trained operators in laboratory settings. Other approaches, such as new methods combining isothermal nucleic acid amplification with portable platforms (Du et al., 2017; Pardee et al., 2016), offer high detection specificity in a point-of-care (POC) setting, but have somewhat limited applications due to low sensitivity. As nucleic acid diagnostics become increasingly relevant for a variety of healthcare applications, detection technologies that provide high specificity and sensitivity at low-cost would be of great utility in both clinical and basic research settings

### SUMMARY

[0005] In one aspect, the invention provides a nucleic acid detection system comprising: a CRISPR system comprising an effector protein and one or more guide RNAs designed to bind to corresponding target molecules; a RNA-based masking construct; and optionally, nucleic acid amplification reagents to amplify target RNA molecules in a sample. In another aspect, the embodiments provide a polypeptide detection system comprising: a CRISPR system comprising an effector protein and one or more guide RNAs designed to bind a trigger RNA, a RNA-based masking construct; and one or more detection aptamers comprising a masked RNA polymerase promoter binding site or a masked primer binding site.

[0006] In further embodiments, the system may further comprise nucleic acid amplification reagents. The nucleic acid amplification reagents may comprise a primer comprising an RNA polymerase promoter. In certain embodiments, sample nucleic acids are amplified to obtain a DNA template comprising an RNA polymerase promoter, whereby a target RNA molecule may be generated by transcription. The nucleic acid may be DNA and amplified by any method described herein. The nucleic acid may be RNA and amplified by a reverse transcription method as described herein. The aptamer sequence may be amplified upon unmasking of the primer binding site, whereby a trigger RNA is transcribed from the amplified DNA product. The target molecule may be a target DNA and the system may further comprises a primer that binds the target DNA and comprises a RNA polymerase promoter.

[0007] In one example embodiment, the CRISPR system effector protein is a RNA-targeting effector protein. Example RNA-targeting effector proteins include C2c2 (now known as Cas13a), Cas13b, and Cas13a. It will be understood that the term “C2c2” herein is used interchangeably with “Cas13a.” In another example embodiment, the RNA-targeting effector protein is C2c2. In other embodiments, the C2c2 effector protein is from an organism of a genus selected from the group consisting of: Leptotrichia, Listeria, Corynebacter, Sutterella, Legionella, Treponema, Filifactor, Eubacterium, Streptococcus, Lactobacillus, Mycoplasma, Bacteroides, Flaviivola, Flavobacterium, Sphaerochaeta, Azospirillum, Gluconacetobacter, Neisseria, Roseburia, Parvibaculum, Staphylococcus, Nitratifractor, Mycoplasma, Campylobacter, and Lachnospira, or the C2c2 effector protein is an organism selected from the group consisting of: Leptotrichia shahii, Leptotrichia wadei, Listeria seeligeri, Clostridium aminophilum, Carnobacterium gallinarum, Paludibacter propionicigenes, Listeria weihenstephanensis, or the C2c2 effector protein is a L. wadei F0279 or L. wadei F0279 (Lw2) C2C2 effector protein. In another embodiment, the one or more guide RNAs are designed to detect a single nucleotide polymorphism, splice variant of a transcript, or a frameshift mutation in a target RNA or DNA.

[0008] In other embodiments, the one or more guide RNAs are designed to bind to one or more target molecules that are diagnostic for a disease state. In still further embodiments, the disease state is an infection, an organ disease, a blood disease, an immune system disease, a cancer, a brain and nervous system disease, an endocrine disease, a pregnancy or childbirth-related disease, an inherited disease, or an environmentally-acquired disease. In still further embodiments, the disease state is cancer or an autoimmune disease or an infection.

[0009] In further embodiments, the one or more guide RNAs are designed to bind to one or more target molecules comprising cancer specific somatic mutations. The cancer specific mutation may confer drug resistance. The drug resistance mutation may be induced by treatment with ibrutinib, erlotinib, imatinib, gefitinib, crizotinib, trastuzumab, vemurafenib, RAF/MEK, check point blockade therapy, or antiestrogen therapy. The cancer specific mutations may be present in one or more genes encoding a protein selected from the group consisting of Programmed Death-Ligand 1 (PD-L1), androgen receptor (AR), Bruton's Tyrosine Kinase (BTK), Epidermal Growth Factor Receptor (EGFR), BCR-Abl, c-kit, PIK3CA, HER2, EML4-ALK, KRAS, ALK, ROS1, AKT1, BRAF, MEK1, MEK2, NRAS, RAC1, and ESR1. The cancer specific mutation may be a mutation in a gene selected from the group consisting of CASP8, B2M, PIK3CA, SMC1A, ARID5B, TET2, ALPK2, COL5A1, TP53, DNER, NCOR1, MORC4, CIC, IRF6, MYOCD, ANKLE1, CNKSR1, NF1, SOS1, ARID2, CUL4B, DDX3X, FUBP1, TCP11L2, HLA-A, B or C, CSNK2A1, MET, ASXL1, PD-L1, PD-L2, IDO1, IDO2, ALOX12B and ALOX15B, or copy number gain, excluding whole-chromosome events, impacting any of the following chromosomal bands: 6q16.1-q21, 6q22.31-q24.1, 6q25.1-q26, 7p11.2-q11.1, 8p23.1, 8p11.23-p11.21 (containing IDO1, IDO2), 9p24.2-p23 (containing PDL1, PDL2), 10p15.3, 10p15.1-p13, 11p14.1, 12p13.32-p13.2, 17p13.1 (containing ALOX12B, ALOX15B), and 22q11.1-q11.21.

[0010] In further embodiments, the one or more guide RNAs may be designed to bind to one or more target molecules comprising loss-of-heterozygosity (LOH) markers.

[0011] In further embodiments, the one or more guide RNAs may be designed to bind to one or more target molecules comprising single nucleotide polymorphisms (SNP). The disease may be heart disease and the target molecules may be VKORC1, CYP2C9, and CYP2C19.

[0012] In further embodiments, the disease state may be a pregnancy or childbirth-related disease or an inherited disease. The sample may be a blood sample or mucous sample. The disease may be selected from the group consisting of Trisomy 13, Trisomy 16, Trisomy 18, Klinefelter syndrome (47, XXY), (47, XYY) and (47, XXX), Turner syndrome, Down syndrome (Trisomy 21), Cystic Fibrosis, Huntington's Disease, Beta Thalassaemia, Myotonic Dystrophy, Sickle Cell Anemia, Porphyria, Fragile-X-Syndrome, Robertsonian translocation, Angelman syndrome, DiGeorge syndrome and Wolf-Hirschhom Syndrome.

[0013] In further embodiments, the infection is caused by a virus, a bacterium, or a fungus, or the infection is a viral infection. In specific embodiments, the viral infection is caused by a double-stranded RNA virus, a positive sense RNA virus, a negative sense RNA virus, a retrovirus, or a combination thereof, or the viral infection is caused by a Coronaviridae virus, a Picomaviridae virus, a Caliciviridae virus, a Flaviviridae virus, a Togaviridae virus, a Bornaviridae, a Filoviridae, a Paramyxoviridae, a Pneumoviridae, a Rhabdoviridae, an Arenaviridae, a Bunyaviridae, an Orthomyxoviridae, or a Deltavirus, or the viral infection is caused by Coronavirus, SARS, Poliovirus, Rhinovirus, Hepatitis A, Norwalk virus, Yellow fever virus, West Nile virus, Hepatitis C virus, Dengue fever virus, Zika virus, Rubella virus, Ross River virus, Sindbis virus, Chikungunya virus, Boma disease virus, Ebola virus, Marburg virus, Measles virus, Mumps virus, Nipah virus, Hendra virus, Newcastle disease virus, Human respiratory syncytial virus, Rabies virus, Lassa virus, Hantavirus, Crimean-Congo hemorrhagic fever virus, Influenza, or Hepatitis D virus.

[0014] In other embodiments of the invention, the RNA-based masking construct suppresses generation of a detectable positive signal or the RNA-based masking construct suppresses generation of a detectable positive signal by masking the detectable positive signal, or generating a detectable negative signal instead, or the RNA-based masking construct comprises a silencing RNA that suppresses generation of a gene product encoded by a reporting construct, wherein the gene product generates the detectable positive signal when expressed.

[0015] In further embodiments, the RNA-based masking construct is a ribozyme that generates the negative detectable signal, and wherein the positive detectable signal is generated when the ribozyme is deactivated, or the ribozyme converts a substrate to a first color and wherein the substrate converts to a second color when the ribozyme is deactivated.

[0016] In other embodiments, the RNA-based masking agent is a RNA aptamer, or the aptamer sequesters an enzyme, wherein the enzyme generates a detectable signal upon release from the aptamer by acting upon a substrate, or the aptamer sequesters a pair of agents that when released from the aptamers combine to generate a detectable signal.

[0017] In another embodiment, the RNA-based masking construct comprises a RNA oligonucleotide to which a detectable ligand and a masking component are attached. In another embodiment, the detectable ligand is a fluorophore and the masking component is a quencher molecule, or the reagents to amplify target RNA molecules such as, but not limited to, NASBA or RPA reagents.

[0018] In another aspect, the invention provides a diagnostic device comprising one or more individual discrete volumes, each individual discrete volumes comprising a CRISPR effector protein, one or more guide RNAs designed to bind to corresponding target molecule, a RNA-based masking construct, and optionally further comprise nucleic acid amplification reagents.

[0019] In another aspect, the invention provides a diagnostic device comprising one or more individual discrete volumes, each individual discrete volume comprising a CRISPR effector protein, one or more guide RNAs designed to bind to a trigger RNA, one or more detection aptamers comprising a masked RNA polymerase promoter binding site or a masked primer binding site, and optionally further comprising nucleic acid amplification reagents.

[0020] In some embodiments, the individual discrete volumes are droplets, or the individual discrete volumes are defined on a solid substrate, or the individual discrete volumes are microwells, or the individual discrete volumes are spots defined on a substrate, such as a paper substrate.

[0021] In certain other example embodiments, the nucleic acid detection system is designed to detect one or more viral targets and used in conjunction an anti-viral therapeutic. In certain example embodiments, the anti-viral therapeutic is a Class 2, type VI CRISPR-based anti-viral system. For example, the nucleic acid detection systems may be used with the anti-viral systems to drug resistance or susceptibility of viral strains infecting a particular patient or prevalent in a given outbreak to select an appropriate therapeutic agent. This includes diagnostic systems that can detect novel mutations that arise in the course of therapy as well as mutations known to arise which lead to treatment resistance. Such diagnostic system embodiments disclosed herein may be used as companion diagnsotics to anti-viral therapeutics to select an an appropriate initial anti-viral therapy and also to modify an anti-viral therapy in response to resistant mutants that may emerge. In example embodiments in which the anti-viral is a Class 2, type VI CRISPR-based anti-viral therapeutic, the diagnostic system embodiments disclosed herein may be used to select and/or modify the guide sequence used by the Class 2, type VI CRISPR-based anti-viral therapeutic to direct the effector protein against the target viral agent nucleic acid sequences.

[0022] In one embodiment, the RNA targeting effector protein is a CRISPR Type VI RNA-targeting effector protein such as C2c2, Cas13b, or Cas13c. In certain example embodiments, the C2c2 effector protein is from an organism selected from the group consisting of: Leptotrichia, Listeria, Corynebacter, Sutterella, Legionella, Treponema, Filifactor, Eubacterium, Streptococcus, Lactobacillus, Mycoplasma, Bacteroides, Flaviivola, Flavobacterium, Sphaerochaeta, Azospirillum, Gluconacetobacter, Neisseria, Roseburia, Parvibaculum, Staphylococcus, Nitratifractor, Mycoplasma and Campylobacter, or the C2c2 effector protein is selected from the group consisting of: Leptotrichia shahii, L. wadei, Listeria seeligeri, Lachnospiraceae bacterium, Clostridium aminophilum, Carnobacterium gallinarum, Paludibacter propionicigenes, Listeria weihenstephanensis, Listeriaceae bacterium, and Rhodobacter capsulatus, the C2c2 effector protein is a L. wadei F0279 or L. wadei F0279 (Lw2) C2c2 effector protein. In another embodiment, the one or more guide RNAs are designed to bind to one or more target RNA sequences that are diagnostic for a disease state.

[0023] In certain example embodiments, the RNA-based masking construct suppresses generation of a detectable positive signal, or the RNA-based masking construct suppresses generation of a detectable positive signal by masking the detectable positive signal, or generating a detectable negative signal instead, or the RNA-based masking construct comprises a silencing RNA that suppresses generation of a gene product encoded by a reporting construct, wherein the gene product generates the detectable positive signal when expressed.

[0024] In another example embodiment, the RNA-based masking construct is a ribozyme that generates a negative detectable signal, and wherein the positive detectable signal is generated when the ribozyme is deactivated. In one example embodiment, the ribozyme converts a substrate to a first color and wherein the substrate converts to a second color when the ribozyme is deactivated. In another example embodiment, the RNA-based masking agent is an aptamer that sequesters an enzyme, wherein the enzyme generates a detectable signal upon release from the aptamer by acting upon a substrate, or the aptamer sequesters a pair of agents that when released from the aptamers combine to generate a detectable signal.

[0025] In another example embodiment, the RNA-based masking construct comprises a RNA oligonucleotide to which are attached a detectable ligand oligonucleotide and a masking component. In certain example embodiments, the detectable ligand is a fluorophore and the masking component is a quencher molecule.

[0026] In another aspect, the invention provides a method for detecting target RNAs in samples, comprising: distributing a sample or set of samples into one or more individual discrete volumes, the individual discrete volumes comprising a CRISPR system comprising an effector protein, one or more guide RNAs, a RNA-based masking construct; incubating the sample or set of samples under conditions sufficient to allow binding of the one or more guide RNAs to one or more target molecules; activating the CRISPR effector protein via binding of the one or more guide RNAs to the one or more target molecules, wherein activating the CRISPR effector protein results in modification of the RNA-based masking construct such that a detectable positive signal is produced; and detecting the detectable positive signal, wherein detection of the detectable positive signal indicates a presence of one or more target molecules in the sample.

[0027] In another aspect, the invention provides a method for detecting peptides in samples, comprising: distributing a sample or set of samples into a set of individual discrete volumes, the individual discrete volumes comprising peptide detection aptamers, a CRISPR system comprising an effector protein, one or more guide RNAs, a RNA-based masking construct, wherein the peptide detection aptamers comprising a masked RNA polymerase site and configured to bind one or more target molecules; incubating the sample or set of samples under conditions sufficient to allow binding of the peptide detection aptamers to the one or more target molecules, wherein binding of the aptamer to a corresponding target molecule exposes the RNA polymerase binding site resulting in RNA synthesis of a trigger RNA; activating the CRISPR effector protein via binding of the one or more guide RNAs to the trigger RNA, wherein activating the CRISPR effector protein results in modification of the RNA-based masking construct such that a detectable positive signal is produced; and detecting the detectable positive signal, wherein detection of the detectable positive signal indicates a presence of one or more target molecules in a sample.

[0028] In certain example embodiments, such methods further comprise amplifying the sample RNA or the trigger RNA. In other embodiments, amplifying RNA comprises amplification by NASBA or RPA.

[0029] In certain example embodiments, the CRISPR effector protein is a CRISPR Type VI RNA-targeting effector protein, such as C2c2 or Cas13b. In other example embodiments, the C2c2 effector protein is from an organism selected from the group consisting of: Leptotrichia, Listeria, Corynebacter, Sutterella, Legionella, Treponema, Filifactor, Eubacterium, Streptococcus, Lactobacillus, Mycoplasma, Bacteroides, Flaviivola, Flavobacterium, Sphaerochaeta, Azospirillum, Gluconacetobacter, Neisseria, Roseburia, Parvibaculum, Staphylococcus, Nitratifractor, Mycoplasma and Campylobacter, or the C2c2 effector protein is selected from the group consisting of: Leptotrichia shahii, L. wadei, Listeria seeligeri, Lachnospiraceae bacterium, Clostridium aminophilum, Carnobacterium gallinarum, Paludibacter propionicigenes, Listeria weihenstephanensis, Listeriaceae bacterium, and Rhodobacter capsulatus In a specific embodiment, the C2c2 effector protein is a L. wadei F0279 or L. wadei F0279 (Lw2) C2C2 effector protein.

[0030] In certain example embodiments, the one or more guide RNAs are designed to bind to one or more target molecules that are diagnostic for a disease state. In certain other example embodiments, the disease state is an infection, an organ disease, a blood disease, an immune system disease, a cancer, a brain and nervous system disease, an endocrine disease, a pregnancy or childbirth-related disease, an inherited disease, or an environmentally-acquired disease, cancer, or a fungal infection, a bacterial infection, a parasite infection, or a viral infection.

[0031] In certain example embodiments, the RNA-based masking construct suppresses generation of a detectable positive signal, or the RNA-based masking construct suppresses generation of a detectable positive signal by masking the detectable positive signal, or generating a detectable negative signal instead, or the RNA-based masking construct comprises a silencing RNA that suppresses generation of a gene product encoded by a reporting construct, wherein the gene product generates the detectable positive signal when expressed, or the RNA-based masking construct is a ribozyme that generates the negative detectable signal, and wherein the positive detectable signal is generated when the ribozyme is inactivated. In other example embodiments, the ribozyme converts a substrate to a first state and wherein the substrate converts to a second state when the ribozyme is inactivated, or the RNA-based masking agent is an aptamer, or the aptamer sequesters an enzyme, wherein the enzyme generates a detectable signal upon release from the aptamer by acting upon a substrate, or the aptamer sequesters a pair of agents that when released from the aptamers combine to generate a detectable signal. In still further embodiments, the RNA-based masking construct comprises a RNA oligonucleotide with a detectable ligand on a first end of the RNA oligonucleotide and a masking component on a second end of the RNA oligonucleotide, or the detectable ligand is a fluorophore and the masking component is a quencher molecule.

[0032] In certain example embodiments, the methods, systems and devices disclosed herein may be used to detect SNPs associated with fetal microencephaly. Example fetal microencephaly mutations that may be detected using the embodiments disclosed herein are disclosed in Yuan et al. Science 10.1126/science.aam7120 (2017).

[0033] These and other aspects, objects, features, and advantages of the example embodiments will become apparent to those having ordinary skill in the art upon consideration of the following detailed description of illustrated example embodiments.

### BRIEF DESCRIPTION OF THE DRAWINGS

[0034] FIG. 1—is a schematics of an example C2c2 based CRISPR effector system.

[0035] FIG. 2—provides (A) schematic of the CRISPR/C2c2 locus from Leptotrichia wadei. Representative crRNA structures from LwC2c2 and LshC2c2 systems are shown. (SEQ. I.D. Nos. 142 and 143) (B) Schematic of in vivo bacterial assay for C2c2 activity. A protospacer is cloned upstream of the beta-lactamase gene in an ampicillin-resi stance plasmid, and this construct is transformed into E. coli expressing C2c2 in conjunction with either a targeting or non-targeting spacer. Successful transformants are counted to quantify activity. (C) Quantitation of LwC2c2 and LshC2c2 in vivo activity. (n=2 biological replicates; bars represent mean±s.e.m.) (D) Final size exclusion gel filtration of LwC2c2. (E) Coomassie blue stained acrylamide gel of LwC2c2 stepwise purification. (F) Activity of LwC2c2 against different PFS targets. LwC2c2 was targeted against fluorescent RNA with variable 3′ PFS flanking the spacer, and reaction products were visualized on denaturing gel. LwC2c2 shows a slight preference against G PFS.

[0036] FIGS. 3-6—Shows detection of an example masking constructs at different dilutions using 1 μg, 100 ng, 10 ng, and 1 ng of target with 4 different amounts of protein/crRNA (1:4, 1:16, 1:32, 1:64) with 2 pools of crRNAs, no crRNA condition, technical duplicates, in (96+48)*2=288 reactions, measured in 5 min interval over 3 hours.

[0037] FIG. 7—provides a schematic of an example detection scheme using a masking construct and CRISPR effector protein, in accordance with certain example embodiments.

[0038] FIG. 8—provides a set of graphs showing changes in fluorescence over time when detecting a target using different pools of guide RNAs.

[0039] FIG. 9—provides a graph showing the normalized fluorescence detected across different dilutions of target RNA at varying concentrations of CRISPR effector protein.

[0040] FIG. 10—is a schematic showing the general steps of a NASBA amplification reaction.

[0041] FIG. 11—provides a graph showing detection of nucleic acid target ssRNA 1 amplified by NASBA with three different primer sets and then subjected to C2c2 collateral detection using a quenched fluorescent probe. (n=2 technical replicates; bars represent mean±s.e.m.)

[0042] FIG. 12—provides a graph showing that the collateral effect may be used to detect the presence of a lentiviral target RNA.

[0043] FIG. 13—provides a graph demonstrating that the collateral effect and NASBA can detect species at aM concentrations.

[0044] FIG. 14—provides a graph demonstrating that the collateral effect and NASBA quickly discriminate low concentration samples.

[0045] FIG. 15—Shows that normalized fluorescence at particular time points is predictive of sample input concentration. Fluorescence measurements from Cas13a detection without amplification are correlated with input RNA concentration. (n=2 biological replicates; bars represent mean±s.e.m.)

[0046] FIG. 16—provides a schematic of the RPA reaction, showing the participating components in the reaction.

[0047] FIG. 17—schematic of SHERLOCK; provides a schematic showing detection of both DNA or RNA targets via incorporation of a RPA or a RT-RPA step accordingly. Upon recognition of target RNA, the collateral effect causes C2c2 to cut the cleavage reporter, generating fluorescence. Single-molecule amounts of RNA or DNA can be amplified to DNA via recombinase polymerase amplification (RPA) and transcribed to produce RNA, which is then detected by C2c2.

[0048] FIG. 18—provides a schematic of ssRNA target detected via the C2c2 collateral detection (SEQ. I.D. Nos. 144 and 145).

[0049] FIG. 19—provides a set of graphs demonstrating single molecule DNA detection using RPA (i.e. within 15 minutes of C2c2 addition).

[0050] FIG. 20—provides a set of graphs demonstrating that mixing T7 polymerase into a RPA reaction does adversely affect DNA detection.

[0051] FIG. 21—provides a set of graphs demonstrating that mixing polymerase into a RPA reaction does not adversely affect DNA detection

[0052] FIG. 22—provides a graph demonstrating that RPA, T7 transcription, and C2c2 detection reactions are compatible and achieve single molecule detection when incubated simultaneously. (n=2 technical replicates; bars represent mean±s.e.m.)

[0053] FIG. 23—provides a set of graphs demonstrating the efficacy of quick RPA-RNA time incubations.

[0054] FIG. 24—provides a set of graphs demonstrating that increasing T7 polymerase amount boosts sensitivity for RPA-RNA.

[0055] FIG. 25—provides a set of graphs showing results from a RPA-DNA detection assay using a one-pot reaction with 1.5× enzymes. Single molecule (2aM) detection achieved as early as 30 minutes.

[0056] FIG. 26—provides a set of graphs demonstrating that a RPA-DNA one-pot reaction demonstrates a quantitative decrease in fluorescence relative to input concentration. The fitted curve reveals relationship between target input concentration and output fluorescence

[0057] FIG. 27—provides a set of graphs demonstrating that (A) C2c2 detection of RNA without amplification can detect ssRNA target at concentrations down to 50 fM. (n=2 technical replicates; bars represent mean±s.e.m.), and that (B) the RPA-C2c2 reaction is capable of single-molecule DNA detection. (n=4 technical replicates; bars represent mean±s.e.m.).

[0058] FIG. 28—provides a set of graphs demonstrating that a C2c2 signal generated in accordance with certain example embodiments can detect a 20 pM target on a paper substrate.

[0059] FIG. 29—provides a graph showing that a specific RNAse inhibitor is cable of removing background signal on paper.

[0060] FIG. 30 is a set of graphs showing detection using systems in accordance with certain example embodiments on glass fiber substrates.

[0061] FIG. 31—provides a set of graphs providing (A) a schematic of Zia RNA detection in accordance with certain example embodiments. Lentivirus was packaged with Zika RNA or homologous Dengue RNA fragments targeted by C2c2 collateral detection. Media is harvested after 48 hours and subjected to thermal lysis, RT-RPA, and C2c2 detection. (B) RT-RAP-C2c2 detection is capable of highly sensitive detection of the Zika lentiviral particles (n=4 technical replicates, two-tailed Student t-test; *****, p<0.0001; bars represent mean±s.e.m.) (C) A schematic of Zika RNA detection using freeze-dried C2c2 on paper, in accordance with certain example embodiments. (D) The paper-based assay is capable of highly sensitive detection of Zika lentiviral particles (n-4 technical replicates, two-tailed Student t-test; ****, p<0.0001; **, p<0.01, bars represent mean±s.e.m.)

[0062] FIG. 32—provides a set of graphs demonstrating (A) A schematic for C2c2 detection of Zika RNA isolated from human serum. Zika RNA in serum is subjected to reverse transcription, RNase H degradation of the RNA, RPA of the cDNA, and C2c2 detection. (B) C2c2 is capable of highly sensitive detection of human Zika serum samples. Concentrations of Zika RNA shown were verified by qPCR. (n=4 technical replicates, two-tailed Student t-test; ****, p<0.0001; bars represent mean±s.e.m.)

[0063] FIG. 33—provides a set of graphs demonstrating (A) freeze-dried C2c2 is capable of sensitive detection of ssRNA 1 in the low femtomolar range. C2c2 is capable of rapid detection of a 200 pM ssRNA 1 target on paper in liquid form (B) or freeze dried (C). The reaction is capable of sensitive detection of synthesized Zika RNA fragments in solution (D) (n=3) and in freeze-dried form (E) (n=3). (F) Quantitative curve for human zika cDNA detection showing significant correlation between input concentration and detected fluorescence. (G) C2c2 detection of ssRNA 1 performed in the presence of varying amounts of human serum. (n=2 technical replicates, unless otherwise noted; bars represent mean±s.e.m.).

[0064] FIG. 34—provides (A) schematic of C2c2 detection of 16S rRNA gene from bacterial genomes using a universal V3 RPA primer set, and (B) the ability to achieve sensitive and specific detection of E. coli or P. aeruginosa gDNA using an assay conducted in accordance with certain example embodiments. (n=4 technical replicates, two-tailed Student t-test; ****, p<0.0001; bars represent mean±s.e.m.). Ec, Escherichia coli; Kp, Klebsiella pneumoniae; Pa, Pseudomonas aeruginosa; Mt, Mycobacterium tuberculosis; Sa, Staphylococcus aureus.

[0065] FIG. 35—provides a set of graphs demonstrating (A) detection of two different carbapenem-resistance genes (KPC and NDM-1) from four different clinical isolates of Klebsiella pneumoniae, and (B) detection of carbapenem-resistance genes (part A) is normalized as a ratio of signal between the KPC and NDM-1 crRNA assays. (n=2 technical replicates, two-tailed Student t-test; ****, p<0.0001; bars represent mean±s.e.m.)

[0066] FIG. 36—provides a set of graphs demonstrating that (A) C2c2 is not sensitive to single mismatches, but can distinguish between single nucleotide differences in target when loaded with crRNAs with additional mismatches. ssRNA targets 1-3 were detected with 11 crRNAs, with 10 spacers containing synthetic mismatches at various positions in the crRNA. Mismatched spacers did not show reduced cleavage of target 1, but showed inhibited cleavage of mismatch targets 2 and 3 (SEQ. I.D. Nos. 146 through 159). (B) Schematic showing the process for rational design of single-base specific spacers with synthetic mismatches. Synthetic mismatches are placed in proximity to the SNP or base of interest. (SEQ. I.D. Nos. 160 through 164) (C) Highly specific detection of strain SNPs allows for the differentiation of Zika African versus American RNA targets differing by only one nucleotide using C2c2 detection with truncated (23 nucleotide) crRNAs. (n=2 technical replicates, one-tailed Student t-test;*, p<0.05; ****, p<0.0001; bars represent mean±s.e.m.).

[0067] FIG. 37—provides a set of graphs demonstrating: (A) Schematic of Zika strain target regions and the crRNA sequences used for detection. (SEQ. I.D. Nos. 165 through 170) SNPs in the target are highlighted red or blue and synthetic mismatches in the guide sequence are colored red. (B) Highly specific detection of strain SNPs allows for the differentiation of Zika African versus American RNA targets using SHERLOCK. (n=2 technical replicates, two-tailed Student t-test; ****, p<0.0001; bars represent mean±s.e.m.) (SEQ. I.D. Nos. 171 through 176) (C) Schematic of Dengue strain target regions and the crRNA sequences used for detection. SNPs in the target are highlighted red or blue and synthetic mismatches in the guide sequence are colored red. (D) Highly specific detection of strain SNPs allows for the differentiation of Dengue strain 1 versus strain 3 RNA targets using SHERLOCK. (n=2 technical replicates, two-tailed Student t-test; ****, p<0.0001; bars represent mean±s.e.m.) (FIG. 37)

[0068] FIG. 38—provides a set of graphs showing (A) circos plot showing location of human SNPs detected with C2c2. (B) The assay conducted in accordance with certain example embodiments can distinguish between human SNPs. SHERLOCK can correctly genotype four different individuals at four different SNP sites in the human genome. The genotypes for each individual and identities of allele-sensing crRNAs are annotated below each plot. (n=4 technical replicates; two-tailed Student t-test; *, p<0.05; **, p<0.01; ***, p<0.001; ****, p<0.0001; bars represent mean±s.e.m.), (C) A schematic of process for detection of cfDNA (such as cell free DNA detection of cancer mutations) in accordance with certain example embodiments. (D) Example crRNA sequences for detecting EGFR L858R and BRAF V600E. (SEQ. I.D. Nos. 177 through 182). Sequences of two genomic loci assayed for cancer mutations in cell-free DNA. Shown are the target genomic sequence with the SNP highlighted in blue and the mutant/wildtype sensing crRNA sequences with synthetic mismatches colored in red.

[0069] FIG. 39—provides a set of graphs demonstrating that C2c2 can detect the mutant minor allele in mock cell-free DNA samples from the EGFR L858R (C) or the BRAF V600E (B) minor allele. (n=4 technical replicates, two tailed Student t-test;*, p<0.05; **, p<0.01, ****, P<0.0001; bars represent ±s.e.m.)

[0070] FIG. 40—provides a set of graphs demonstrating that (A) the assay can distinguish between genotypes at rs5082. (n=4 technical replicates; *, p<0.05; **, p<0.01; ***, p<0.001; ****, p<0.0001; bars represent mean±s.e.m.) (B) the assay can distinguish between genotypes at rs601338 in gDNA directly from centrifuged, denatured, and boiled saliva. (n=3 technical replicates; *, p<0.05; bars represent mean±s.e.m.)

[0071] FIG. 41—provides (A) a schematic of an example embodiment performed on ssDNA 1 in the background of a target that differs from ssDNA 1 by only a single mismatch. (B) The assay achieves single nucleotide specificity detection of ssDNA 1 in the presence of mismatched background (target that differs by only a single mismatch from ssDNA). Various concentrations of target DNA were combined with a background excess of DNA with one mismatch and detected by the assay.

[0072] FIG. 42 is a graph showing a masking construct with a different dye Cy5 also allows for effective detection.

[0073] FIG. 43 is a schematic of a gold nanoparticle colorimetric based assay. AuNPs are aggregated using a combination of DNA linkers and a RNA bridge. Upon addition of RNase activity, the ssRNA bridge is cleaved and the AuNPs are released, causing a characteristic color shifts toward red.

[0074] FIG. 44 is a graph showing the ability to detect the shift in color of dispersed nanoparticles at 520 nm. The nanoparticles were based on the example embodiment shown in FIG. 43 and dispersed using addition of RNase A to at varying concentrations.

[0075] FIG. 45 is a graph showing that the RNase colorimetric test is quantitative.

[0076] FIG. 46 is a picture of a microwell plate showing that the color shift in the dispersed nanoparticle is visually detectable.

[0077] FIG. 47 is a picture demonstrating that the colorimetric shift is visible on a paper substrate. The test was performed for 10 minutes at 37 degrees C. on glass fiber 934-AH.

[0078] FIG. 48 is a schematic of a conformation switching aptamers in accordance with certain example embodiments for detection of protein or small molecules. The ligated product (B) is used as a complete target for the RNA-targeting effector, which cannot detect the unligated input product. (SEQ. ID. Nos. 202 and 424).

[0079] FIG. 49 is an image of a gel showing that aptamer-based ligation can create RPA-detectable substrates. Aptamers were incubated with various levels of thrombin and then ligated with probe. Ligated constructs were used as templates for a 3 minute RPA reaction. 500 nM thrombin has significantly higher levels of amplified target than background.

[0080] FIG. 50 shows the amino acid sequence of the HEPN domains of selected C2c2 orthologues. (SEQ. ID. Nos. 204-233)

[0081] FIG. 51 Cas13a detection of RNA with RPA amplification (SHERLOCK) can detect ssRNA target at concentrations down to ˜2 aM, more sensitive than Cas13a alone. (n=4 technical replicates; bars represent mean±s.e.m.)

[0082] FIG. 52—Cas13a detection can be used to sense viral and bacterial pathogens. (A) Schematic of SHERLOCK detection of ZIKV RNA isolated from human clinical samples. (B) SHERLOCK is capable of highly sensitive detection of human ZIKV-positive serum (S) or urine (U) samples. Approximate concentrations of ZIKV RNA shown were determined by qPCR. (n=4 technical replicates, two-tailed Student t-test; ****, p<0.0001; bars represent mean±s.e.m.; n.d., not detected)

[0083] FIG. 53—Comparison of detection of ssRNA 1 by NASBA with primer set 2 (of FIG. 11) and SHERLOCK. (n=2 technical replicates; bars represent mean±s.e.m.)

[0084] FIG. 54 Nucleic acid amplification with RPA and single-reaction SHERLOCK. (A) Digital-droplet PCR quantitation of ssRNA 1 for dilutions used in FIG. 1C. Adjusted concentrations for the dilutions based on the ddPCR results are shown above bar graphs. (B) Digital-droplet PCR quantitation of ssDNA 1 for dilutions used in FIG. 1D. Adjusted concentrations for the dilutions based on the ddPCR results are shown above bar graphs. (C) The RPA, T7 transcription, and Cas13a detection reactions are compatible and achieve single molecule detection of DNA 2 when incubated simultaneously. (n=3 technical replicates, two-tailed Student t-test; n.s., not significant; **, p<0.01; ****, p<0.0001; bars represent mean±s.e.m.)

[0085] FIG. 55—Comparison of SHERLOCK to other sensitive nucleic acid detection tools. (A) Detection analysis of ssDNA 1 dilution series with digital-droplet PCR. (n=4 technical replicates, two-tailed Student t-test; n.s., not significant; *, p<0.05; **, p<0.01; ****, p<0.0001; red lines represent mean, bars represent mean±s.e.m. Samples with measured copy/μL below 10-1 not shown.) (B) Detection analysis of ssDNA 1 dilution series with quantitative PCR. (n=16 technical replicates, two-tailed Student t-test; n.s., not significant; **, p<0.01; ****, p<0.0001; red lines represent mean, bars represent mean±s.e.m. Samples with relative signal below 10-10 not shown.) (C) Detection analysis of ssDNA 1 dilution series with RPA with SYBR Green II. (n=4 technical replicates, two-tailed Student t-test; *, p<0.05; **, p<0.01; red lines represent mean, bars represent mean±s.e.m. Samples with relative signal below 100 not shown.) (D) Detection analysis of ssDNA 1 dilution series with SHERLOCK. (n=4 technical replicates, two-tailed Student t-test; **, p<0.01; ****, p<0.0001; red lines represent mean, bars represent mean±s.e.m. Samples with relative signal below 100 not shown.) (E) Percent coefficient of variation for a series of ssDNA 1 dilutions for four types of detection methods. (F) Mean percent coefficient of variation for the 6e2, 6e1, 6e0, and 6e−1 ssDNA 1 dilutions for four types of detection methods. (bars represent mean±s.e.m.) FIG. 56—Detection of carbapanem resistance in clinical bacterial isolates. Detection of two different carbapenem-resistance genes (KPC and NDM-1) from five clinical isolates of Klebsiella pneumoniae and an E. coli control. (n=4 technical replicates, twotailed Student t-test; ****, p<0.0001; bars represent mean±s.e.m.; n.d., not detected)

[0086] FIG. 57—Characterization of LwCas13a sensitivity to truncated spacers and single mismatches in the target sequence. (A) Sequences of truncated spacer crRNAs (SEQ. ID. Nos, 425-436) used in (B)-(G). Also shown are sequences of ssRNA 1 and 2, which has a single base-pair difference highlighted in red. crRNAs containing synthetic mismatches are displayed with mismatch positions colored in red. (B) Collateral cleavage activity on ssRNA 1 and 2 for 28 nt spacer crRNA with synthetic mismatches at positions 1-7. (n=4 technical replicates; bars represent mean±s.e.m.) (C) Specificity ratios of crRNA tested in (B). Specificity ratios are calculated as the ratio of the on-target RNA (ssRNA 1) collateral cleavage to the off-target RNA (ssRNA 2) collateral cleavage. (n=4 technical replicates; bars represent mean±s.e.m.) (D) Collateral cleavage activity on ssRNA 1 and 2 for 23 nt spacer crRNA with synthetic mismatches at positions 1-7. (n=4 technical replicates; bars represent mean±s.e.m.) (E) Specificity ratios of crRNA tested in (D). Specificity ratios are calculated as the ratio of the on-target RNA (ssRNA 1) collateral cleavage to the off-target RNA (ssRNA 2) collateral cleavage. (n=4 technical replicates; bars represent mean±s.e.m.) (F) Collateral cleavage activity on ssRNA 1 and 2 for 20 nt spacer crRNA with synthetic mismatches at positions 1-7. (n=4 technical replicates; bars represent mean±s.e.m.) (G) Specificity ratios of crRNA tested in (F). Specificity ratios are calculated as the ratio of the on-target RNA (ssRNA 1) collateral cleavage to the off-target RNA (ssRNA 2) collateral cleavage. (n=4 technical replicates; bars represent mean±s.e.m.)

[0087] FIG. 58.—Identification of ideal synthetic mismatch position relative to mutations in the target sequence. (A) Sequences for evaluation of the ideal synthetic mismatch position to detect a mutation between ssRNA 1 and ssRNA 2 (SEQ. ID. Nos. 437-462). On each of the targets, crRNAs with synthetic mismatches at the colored (red) locations are tested. Each set of synthetic mismatch crRNAs is designed such that the mutation location is shifted in position relative to the sequence of the spacer. Spacers are designed such that the mutation is evaluated at positions 3, 4, 5, and 6 within the spacer. (B) Collateral cleavage activity on ssRNA 1 and 2 for crRNAs with synthetic mismatches at varying positions. There are four sets of crRNAs with the mutation at either position 3, 4, 5, or 6 within the spacer:target duplex region. (n=4 technical replicates; bars represent mean±s.e.m.) (C) Specificity ratios of crRNA tested in (B). Specificity ratios are calculated as the ratio of the on-target RNA (ssRNA 1) collateral cleavage to the off-target RNA (ssRNA 2) collateral cleavage. (n=4 technical replicates; bars represent mean±s.e.m.)

[0088] FIG. 59—Genotyping with SHERLOCK at an additional locus and direct genotyping from boiled saliva. SHERLOCK can distinguish between genotypes at the rs601338 SNP site in genomic DNA directly from centrifuged, denatured, and boiled saliva. (n=4 technical replicates, two-tailed Student t-test; **, p<0.01; ****, p<0.001; bars represent mean±s.e.m.)

[0089] FIG. 60—Development of synthetic genotyping standards to accurately genotype human SNPs. (A) Genotyping with SHERLOCK at the rs601338 SNP site for each of the four individuals compared against PCR-amplified genotype standards. (n=4 technical replicates; bars represent mean±s.e.m.) (B) Genotyping with SHERLOCK at the rs4363657 SNP site for each of the four individuals compared against PCR-amplified genotype standards. (n=4 technical replicates; bars represent mean±s.e.m.) (C) Heatmaps of computed p-values between the SHERLOCK results for each individual and the synthetic standards at the rs601338 SNP site. A heatmap is shown for each of the allele-sensing crRNAs. The heatmap color map is scaled such that insignificance (p>0.05) is red and significance (p<0.05) is blue. (n=4 technical replicates, one-way ANOVA). (D) Heatmaps of computed p-values between the SHERLOCK results for each individual and the synthetic standards at the rs4363657 SNP site. A heatmap is shown for each of the allele-sensing crRNAs. The heatmap color map is scaled such that insignificance (p>0.05) is red and significance (p<0.05) is blue. (n=4 technical replicates, one-way ANOVA) (E) A guide for understanding the p-value heatmap results of SHERLOCK genotyping. Genotyping can easily be called by choosing the allele that corresponds to a p-value >0.05 between the individual and allelic synthetic standards. Red blocks correspond to non-significant differences between the synthetic standard and individual's SHERLOCK result and thus a genotype-positive result. Blue blocks correspond to significant differences between the synthetic standard and individual's SHERLOCK result and thus a genotype-negative result.

[0090] FIG. 61—Detection of ssDNA 1 as a small fraction of mismatched background target. SHERLOCK detection of a dilution series of ssDNA 1 on a background of human genomic DNA. Note that there should be no sequence similarity between the ssDNA 1 target being detected and the background genomic DNA. (n=2 technical replicates; bars represent mean±s.e.m.)

[0091] FIG. 62—Urine (A) or serum (B) samples from patients with Zika virus were heat inactivated for 5 minutes at 95° C. (urine) or 65° C. (serum). One microliter of inactivated urine or serum was used as input for a 2 hr RPA reaction followed by a 3 hour C2c2/Cas13a detection reaction, in accordance with an example embodiment. Error bards indicate 1 SD based on n=4 technical replicates for the detection reaction.

[0092] FIG. 63—Urine samples from patients with Zika virus were heat-inactivated for 5 minutes at 95° C. One microliter of inactivated urine was used as input for a 30 minute RPA reaction followed by a 3 hour (A) or 1 hour (B) C2c2/Cas13 detection reaction, in accordance with example embodiments. Error bars indicate 1 SD based on n=4 technical replicates for the detection reaction.

[0093] FIG. 64—Urine samples form patients with Zika virus were heat-inactivated for 5 minutes at 95° C. One microliter of inactivated urine was uased as input for a 20 minute RPA reaction followed by a 1 hour C2c2/Cas13a detection reaction. Healthy human urine was used as a negative control. Error bars indicate 1 SD based on n=4 technical replicates or the detection reaction.

[0094] FIG. 65—Urine samples from patients with Zika virus were heat-inactivated for 5 minutes at 95° C. One microliters of inactivated urine was used as input for a 20 minute RPA reaction followed by a 1 hour C2c2/Cas13a detection reaction in the presence or absence of guide RNA. Data are normalized by substracting the average fluorescence values for no-guide detection reactions from the detection reactions containing guides. Healthy human urine was used as a negative control. Error bars indicate 1 SD based on n=4 technical replicates for the detection reaction.

[0095] FIG. 66—Shows detection of two malaria specific targets with four different guide RNA designs, in accordance with example embodiments. (SEQ. ID. Nos. 463-474).

[0096] FIG. 67—Shows location of designed guide RNAs along the segmented LCMV genome. Guide RNAs S1-S6 are complementary to the MCMV S RNA (of which S1 and S6 bind respectively to the 5′ UTR and 3′UTR). Guide RNAs L1-L6 are complementary to the MCMV L RNA (of which L1 and L6 bind respectively to the 5′ UTR and 3′UTR). All guide RNAs bind to the coding strand.

[0097] FIG. 68—Cas13a and LCMV-specific guide RNA expression decreases LCMV replication in cell culture. A) HEK293FT cells were transfected with plasmids expressing Cas13a and single guide RNAs targeting LCMV or non-targeting controls. 24 hours post-transfection, cells were infected with LCMV at an MOI of 5, and viral titers were measured 48 hours post-infection using RT-qPCR of viral RNA in the culture supernatant. B) Inhibition of viral replication. Empty vector, off-target #1 and off-target #2 are considered negative controls. S1-S5 and L1-L6 target various regions of the LCMV genome. Error bars indicate 1 standard deviation based on n=3-6 biological replicates

[0098] FIG. 69—Inhibition of viral replication. LCMV infected mammalian 293FT cells were transfected with the indicated C2c2 and guide plasmids. Plots represent RT-qPCR values as genome equivalents per microliter with a bar for each transfected guide plasmid. Empty vector, off-target #1 and off-target #2 are considered negative controls. S1-S5 and L1-L6 target various regions of the LCMV genome. Error bars indicate 1 standard deviation based on n=6 biological replicates

[0099] FIG. 70—Combinations of multiple guides enhance the Cas13a-mediated inhibition of LCMV replication. HEK293FT cells were transfected with plasmids expressing Cas13a and one or more guide RNAs targeting LCMV or non-targeting controls. LCMV infection was performed 24 hours post-transfection at an MOI of 5, and viral titers were measured 48 hours post infection using RT-qPCR of viral RNA in the culture supernatant. Empty vector, off-target #1 and off-target #2 are considered negative controls. Error bars indicate one standard deviation based on n=6 biological replicates.

[0100] FIG. 71—Fraction of guides reducing viral replication. Mean GFP fluorescence 48 hours post LCMV infection was calculated from 3 replicates for all guides. Fold-change for each LCMV targeting guide was calculated as the ratio of the mean fluorescence of the control guide over the LCMV targeting guide. P values were calculated using a 2 tailed, unpaired t.test. Targeting guides were considered any guide with a p value less than or equal to 0.05 and fold change (FC) greater than or equal to 2. The pie chart plot the data displayed in the table with wedges corresponding to the non-coding and coding region of LCMV's 4 proteins. Remaining guides are those LCMV targeting guides that do not pass the p value and FC threshold.

[0101] FIG. 72—Distribution of targeting efficiency of targeting guides. The distribution of fold change of GFP fluorescence (control guide over LCMV targeting guide) for guides that passed a p-value threshold of 0.05. Not shown on this graph, 8 guides with GFP fluorescence reduction greater than 50 fold (* 8 guides show reduction >50 fold).

[0102] FIG. 73—Representative images (3 replicates for each guide) illustrating the reduction of GFP (i.e. LCMV replication) for Guide targeting the coding region of L (#104) compared to the control (empty guide vector). Images were taken 48 hours post LCMV infection at magnification of 4×. Fold change 2.72, p value 0.047.

[0103] FIG. 74—Fold change of GFP fluorescence 48 hours post infection of control guide over LCMV-targeting guide for all guides that passed a p-value threshold of 0.05 and fold change threshold of 2. Each position on the x-axis is a guide that was tested in LCMV full-genome screen. Any guide that did not pass this threshold was plotted as 1. For any guide with fluorescence less than or at background, the fold change is set as the maximum fold change observed.

[0104] FIG. 75—Cas13a-based diagnostics can sensitively detect Zika virus nucleic acid. Zika virus cDNA was serially diluted in healthy human urine and water, inactivated endogenous human RNases, and used the SHERLOCK protocol to quantify viral cDNA (a). Several cDNA samples were also tested from patient urine or serum (b), and a combination of guide RNAs were used to distinguish between patient sample collected from different countries during the Zika virus outbreak (c). Error bars indicate one standard deviation. Abbreviations: DOM=Dominican Republic, DOMUSA=Dominican Republic/USA, HND=Honduras, USA=United State of America.

[0105] FIG. 76—provides a graph showing single copy detection of Zika in accordance with certain example embodiments.

[0106] FIG. 77—illustrates the limits of detection of Zika cDNA (a), RNA (b), and virus particles (c) using the SHERLOCK method with Zika virus specific RPA primers and Zika virus specific crRNA. Error bars present 1 S.D. of 3 technical replicates. No input was the addition of nuclease-free water into either water or urine.

[0107] FIG. 78—panel A is a schematic of detecting single nucleotide variants in viral samples. Panel B is a schematic demonstrating the genome position of the 3 SNPs tested by the SHERLOCK method. Panel C shows graphs representing SNPs that arose during the 2015 Zika virus outbreak with the location where the SNP arose. Panel D represents the fluorescence ratio between the mutant cRNA over the wild-type cRNA at the 1 hour time point. Panel E shows a heatmap displaying the log₂ transformed fluorescence ratios shown in FIG. 78D for each of the samples against each of the crRNAs. Values greater than 0 indicate the presence of the mutant variant. Panel F is a graph showing data with the S139N variant. The darkly shaded bars represent the fluorescence measured when the S139N targeting crRNA was used in the detection reaction and the lighter bars represent the fluorescence measured when the N139S targeting crRNA was used. Error bars represent 1 S.D. with 3 technical replicates.

[0108] FIG. 79—panel A shows a schematic representing how the multi-serotype Dengue SHERLOCK panel works. In panel B, each tick on the x-axis represents the gblock template that was used as input for the SHERLOCK reaction. Each shade of purple designates a serotype specific crRNA. Error bars represent 1 S.D. with 3 technical replicates. Panel C shows an alternative representation of the bar plot in (b) as a log 10 scaled fluorescence.

[0109] FIG. 80—a schematic representing how the Flavivirus SHERLOCK panel works is shown in panel A. In panel B, each tick on the x-axis represents the gblock template that was used as input for the SHERLOCK reaction. In panel C, each tick on the x-axis represents the two gblock templates that were used as input for the SHERLOCK reaction to simulate the ability of SHERLOCK to detect co-infections. Within each alternating white and grey block, each bar is the fluorescence resulting from the guide tested with the order of ZIKV crRNA, WNV crRNA, DENV crRNA, and YFV crRNA preserved in each block. In panels B and C, each color designates a virus-specific crRNA. Error bars represent 1 S.D. with 3 technical replicates.

[0110] FIG. 81—Panels A and B show alternative representations of the measured fluorescence represented in the bar plots in FIGS. 80B and 80C, respectively. The gradient is the log 10 scaled fluorescence at 3 hours.

[0111] FIG. 82—Sensitive ZIKV detection from clinical samples and mosquito pools. (A) A schematic of SHERLOCK applied to clinical samples. Nucleic acid is extracted from clinical samples and the target molecule is amplified by recombinase polymerase amplification (RPA). RNA samples are reversed-transcribed (RT) prior to RPA. RPA products are detected using a reaction containing T7 RNA polymerase (for in vitro transcription of the dsDNA RPA product), purified Cas13a, crRNA, and an RNA reporter that fluoresces when cleaved. (B) Testing SHERLOCK on 40 samples collected during the 2016 ZIKV outbreak. SHERLOCK was performed on cDNA with a 20 minute RPA reaction and 1 hour of Cas13a detection. The dashed blue line denotes the threshold for presence or absence of ZIKV (see Methods for details). (C) Comparison of SHERLOCK fluorescence to amplicon PCR yield. SHERLOCK and amplicon PCR were performed on the 40 ZIKV cDNA samples shown in (B). The amplicon PCR yield is the minimum concentration (in ng/μL) of 2 separate amplification reactions using primer pools that tile the ZIKV genome. Dashed lines denote thresholds for determining the presence or absence of ZIKV: blue for SHERLOCK, red for amplicon PCR. The Venn diagram shows the number of samples that passed these thresholds for each method. In some cases, data points are nearly superimposed, indicated by a number in parentheses. N.D.: not detected.

[0112] FIG. 83—Direct detection of ZIKV cDNA, RNA, and particles from urine. (A) Detection of ZIKV cDNA diluted in untreated healthy human urine (red) using SHERLOCK. (B) Detection of ZIKV RNA diluted in untreated (red) or treated (blue) healthy human urine using SHERLOCK. (C) Detection of ZIKV particles diluted in PBS (gray) or untreated healthy human urine (red) using SHERLOCK. Non-diluted viral stock is shown in black. Fluorescence at 3 hours for the most dilute sample and no input is shown (inset). In all panels, samples were treated with TCEP/EDTA and heated to inactivate both the virus and RNases immediately after dilution. The length of heat treatment is indicated in the schematics. Error bars indicate 1 S.D. based on 3 technical replicates.

[0113] FIG. 84—SHERLOCK panels can differentiate viral species and serotypes. (A) Detection of 4 related Flaviviruses using SHERLOCK. (B) Target-specific fluorescence at 3 hours is shown for each crRNA against each virus in both the bar plot and heatmap. (C) Target-specific fluorescence at 3 hours is shown when two viral targets are present in a single sample. (D) Detection of DENV serotypes 1-4 using SHERLOCK. (E) Target-specific fluorescence at 3 hours is shown for serotype-specific crRNAs against each of the DENV serotypes. Target-specific fluorescence is fluorescence for each target against a crRNA relative to the fluorescence of the crRNA with no input. In all panels, error bars indicate 1 S.D. based on 3 technical replicates.

[0114] FIG. 85—Identification of adaptive and functional ZIKV mutations from the outbreak. (A) Schematic showing how SHERLOCK assays are designed for SNP identification. Ancestral crRNAs are denoted using light colors and derived crRNAs using dark colors. (B) SHERLOCK assays for 3 SNPs from the 2016 ZIKV outbreak. Applicants show genomic locations of each of the SNPs and a simplified phylogenetic tree describing their evolutionary relationships. (C) Testing SNP identification using synthetic targets. Fluorescence values for derived crRNAs (dark colors) and ancestral crRNAs (light colors) are shown for each of the 3 region-specific SNPs. (D) Identification of region-specific SNPs in samples from the 2016 ZIKV outbreak. cDNA samples from the Dominican Republic (DOM), United States (USA), and Honduras (HND) were evaluated using the three SNP identification assays. Applicants show the fluorescence ratio (derived crRNA fluorescence divided by ancestral crRNA fluorescence) for each SNP and each sample. (E) Visualization of log₂-transformed data from (D) as a heatmap. (F) Identification of a ZIKV SNP associated with microcephaly. As in (C), dark colors denote the derived crRNA and light colors denote the ancestral crRNA. In all panels, error bars indicate 1 S.D. based on 3 technical replicates.

[0115] FIG. 86—SHERLOCK can detect ZIKV cDNA with high sensitivity. Applicants show SHERLOCK fluorescence values after 20 minutes of RPA and 1 hour of detection for serial dilutions of ZIKV cDNA. Error bars indicate 1 S.D. based on 3 technical replicates. In this experiment, RNase Alert v1 (IDT) was used as the RNA reporter.

[0116] FIG. 87—(A-D) SHERLOCK fluorescence data at 1 hour for 40 cDNA samples from the 2016 ZIKV outbreak. Sample names indicate country of origin, sample collection year, followed by the sample name and sample type. Sample types are as indicated: PLA: plasma sample, SER: serum sample, URI: urine sample, MOS: mosquito pool. Countries of origin are indicated using abbreviations: HND: Honduras, DOM: Dominican Republic, USA: United States. Error bars indicate 1 S.D. based on 3 technical replicates. The positive control (purple) shown in each plot is a cultured viral seed stock (PE243). Negative controls are shown in orange.

[0117] FIG. 88—Amplicon PCR primer pool data and thresholding. (A) A scatterplot of ng/μL concentrations (measured by Agilent tapestation) from each of the 2 amplicon PCR primer pools for each cDNA sample. In some cases, data points are nearly superimposed, indicated by a number in parentheses. N.D.: not detected. The positive control (purple cross) is a cultured viral seed stock (PE243) and the negative controls (orange x) include 1 no input control and 4 single donor healthy urine samples. (B) A scatterplot of the amplicon PCR yield (in ng/μl) versus the genome coverage from the recent Zika sequencing efforts (Metsky et al. 2017). The amplicon PCR yield is defined as the minimum amplicon DNA concentration of the two amplicon PCR pools (measured by Agilent tapestation). Genome coverage is normalized to 1. Technical replicates of sequencing libraries are shown as separate circles. (C) Applicants show the precision (true positives divided by the sum of true positives and false positives), recall (sensitivity), and the F_{0.5} statistic for varying amplicon PCR yield thresholds. The threshold for the amplicon PCR yield was selected to maximize the F_{0.5} statistic.

[0118] FIG. 89—RNase inactivation using heat and chemical treatment. Serial 1:4 dilutions of RNase A (1 μg/ml) or healthy human urine were treated with TCEP and EDTA at final concentrations of 100 mM and 1 mM respectively. Samples were incubated at 95° C. for 10 minutes, then RNase Alert v1 (IDT) was added to each sample, and fluorescence was monitored to determine nuclease activity. Fluorescence values are shown after 1 hour of incubation at 37° C. Error bars indicate 1 S.D. based on 3 technical replicates.

[0119] FIG. 90—(A) Pretreatment of urine allows for sensitive RNA detection with SHERLOCK. Applicants show fluorescence data after 1 hour of detection for RNA diluted in water (blue), and RNA diluted in urine pre-treated at 95° C. for 10 minutes with 100 mM TCEP and 1 mM EDTA (light red). (B) Carrier RNA does not improve SHERLOCK sensitivity. Applicants diluted ZIKV RNA in partially inactivated healthy human urine in the presence or absence of 100 ng of carrier RNA (see Methods section for details). As in (A), 1 hour of detection was used. Error bars indicate 1 S.D. based on 3 technical replicates.

[0120] FIG. 91—RNase inactivation at a lower temperature. Applicants tested a two-step heat inactivation protocol in which healthy human urine was incubated at 50° C. for 20 minutes, followed by 95° C. for 5 minutes. RNA was diluted in urine after the 50° C. step but before the 95° C. step. Error bars indicate 1 S.D. based on 3 technical replicates.

[0121] FIG. 92—Flavivirus panel time course. Each panel shows the background-corrected fluorescence of a viral-specific crRNA against each flavivirus target and the no input control over a 3-hour time course with fluorescence measurements every 5 minutes. Error bars are 1 S.D. based on 3 technical replicates.

[0122] FIG. 93—Flavivirus panel co-infection time course. Each panel shows the background-corrected fluorescence for all crRNAs against sample with two flavivirus targets over a 3-hour time course with fluorescence measurements every 5 minutes. Each panel also includes the background-corrected fluorescence observed for each crRNA against the no input control. Error bars are 1 S.D. based on 3 technical replicates.

[0123] FIG. 94—Dengue panel time course. Each panel shows the background-corrected fluorescence of a DENV serotype-specific crRNA against all DENV serotypes and a no input control over a 3-hour time course with fluorescence measurements every 5 minutes. Error bars are 1 S.D. based on 3 technical replicates.

[0124] FIG. 95—SNP design timeline. Applicants show the steps required to design, build, and test a SHERLOCK-based SNP identification assay. The total turnaround time is less than 1 week.

[0125] FIG. 96—ZIKV microcephaly-associated SNP discrimination with an alternative crRNA design. The SNP is in the 7th position of the crRNA, and there is no synthetic mismatch introduced into the crRNA. Dark colors denote the derived crRNA and light colors denote the ancestral crRNA. Error bars indicate 1 S.D. based on 3 technical replicates.

[0126] FIG. 97—SHERLOCK assays that can identify 6 drug-resistance mutations in HIV reverse transcriptase. Applicants show the SNP identification index, which is calculated by taking the fluorescence ratio for the derived template divided by the fluorescence ratio for the ancestral template (see Methods section for details). This index is equal to 1 if there is no ability to distinguish the ancestral and derived alleles, and increases with increasing ability to discriminate between the two alleles. Error bars indicate 1 S.D. based on 3 technical replicates.

[0127] FIG. 98—illustrates that SHERLOCK can detect ZIKV cDNA with high sensitivity. Shown are SHERLOCK fluorescence values after 20 minutes of RPA and 1 hour of detection for serial dilutions of ZIKV cDNA. Sensitivity of 0.9 aM is equivalent to single copy sensitivity as 2 aM=1 cp/μl and 2 μl of sample was used as input. Error bars indicate 1 S.D. based on 3 technical replicates.

[0128] FIG. 99—shows ZIKV and DENV detection from patient samples and clinical isolates. (A) Schematic of SHERLOCK. Nucleic acid is extracted from clinical samples, and the target is amplified by RPA using either RNA or DNA as input (RT-RPA or RPA, respectively). RPA products are detected in a reaction containing T7 RNA polymerase, Cas13, a target-specific crRNA, and an RNA reporter that fluoresces when cleaved. We tested SHERLOCK on (B) cDNA derived from 37 patient samples collected during the 2015-2016 ZIKV pandemic and (C) cDNA from 16 patient samples that were compared head-to-head with the Altona RealStar Zika Virus RT-PCR assay. +: ZIKV seed stock cDNA (3×102 cp/μl) and X: no input. (D) SHERLOCK on RNA extracted from 24 DENV-positive patient samples and clinical isolates. Dashed blue line: threshold for presence or absence of ZIKV or DENV (see Methods).

[0129] FIG. 100—shows comparison between SHERLOCK and other nucleic acid amplification tests. Shown are Venn diagrams comparing the results of (A) SHERLOCK vs. the Altona Real Star Zika Virus RT-PCR assay, and (B) SHERLOCK vs. the Altona Real Star Zika Virus RT-PCR assay and the Hologic Aptima Zika Virus assay.

[0130] FIG. 101—Schematic of the regions of the ZIKV genome targeted by SHERLOCK and other diagnostic methods. PCR amplicons tile the entire ZIKV genome, whereas the SHERLOCK ZIKV assay targets just one region of the ZIKV genome with a shorter amplicon. The Altona RealStar RT-PCR assay and Hologic Aptima TMA assay also target individual, short amplicons in the ZIKV genome (the locations and sizes of these amplicons are proprietary and are therefore not shown in the schematic). It is possible to have a clinical sample with highly fragmented RNA which cannot be amplified by the PCR primers (which have a product length ˜400 nt). Conversely, it is possible to have a clinical sample with a partial ZIKV genome that does not contain the ˜120 nt SHERLOCK amplicon.

[0131] FIG. 102—shows graphs illustrating limit of detection for pan-dengue SHERLOCK on RNA from 4 DENV serotypes. (A-D) SHERLOCK fluorescence values after 20 minutes of RPA and 1 hour of detection for serial dilutions of DENV RNA derived from a synthetic template. 1 μl of sample was used as input. Error bars indicate 1 S.D. based on 3 technical replicates.

[0132] FIG. 103—illustrates pan-dengue SHERLOCK applied to patient samples and clinical isolates. (A) Pan-dengue SHERLOCK fluorescence for RNA extracted from 24 samples and 4 seed stocks denoted by DENV serotype. (B-D) Pan-dengue SHERLOCK fluorescence for RNA extracted from 14 human serum samples at 1 hour of Cas13 detection (B), 10 cultured clinical isolates at 1 hour (C), and 4 DENV seed stocks at 1 hour (D).

[0133] FIG. 104—Direct detection of ZIKV and DENV in bodily fluids with HUDSON and SHERLOCK. (A) Schematic of direct viral detection using HUDSON and SHERLOCK. (B-C) Detection of ZIKV RNA in particles diluted in healthy human serum (pink, B) or healthy human saliva (blue, C). Same PBS control used in A and B as experiments were performed together. (D) Detection of ZIKV RNA in particles diluted in healthy human urine (yellow). Black: non-diluted viral stock. Grey: dilutions in PBS. Error bars indicate 1 S.D. based on 3 technical replicates. (E-F) Detection of DENV RNA directly from patient serum (E) and saliva samples (F). (G) Lateral flow detection of DENV from samples shown in (E-F). All samples were treated with TCEP/EDTA prior to heating.

[0134] FIG. 105—shows a graph illustrating detection of ZIKV cDNA directly from blood products, with ZIKV cDNA diluted in healthy human whole blood (red), healthy human plasma (purple), healthy human serum (pink) or water (grey) using SHERLOCK. Immediately after dilution, bodily fluids were treated at 50° C. for 5 minutes, followed by 64° C. for 5 minutes with 100 mM TCEP and 1 mM EDTA. Error bars indicate 1 S.D. based on 3 technical replicates.

[0135] FIG. 106—shows a graph illustrating detection of ZIKV cDNA directly from saliva, with ZIKV cDNA diluted in healthy human saliva (blue) or water (grey) using SHERLOCK. Immediately after dilution, bodily fluids were treated at 50° C. for 5 minutes, followed by 64° C. for 5 minutes with 100 mM TCEP and 1 mM EDTA. Error bars indicate 1 S.D. based on 3 technical replicates.

[0136] FIG. 107—shows a graph illustrating rapid RNase inactivation of whole blood, plasma, and urine. Healthy human whole blood, plasma, and urine were diluted as indicated and inactivated at 50° C. for 5 minutes with 100 mM TCEP and 1 mM EDTA. RNase activity was measured using RNase Alert v2 (Thermo) in the presence of 2 U/l Murine RNase inhibitor (NEB) after 1 hour of incubation at 37° C. Two technical replicates are shown for each condition (orange and black bars).

[0137] FIG. 108—graph illustrating detection of Zika virus diluted in whole blood. Detection of ZIKV RNA in particles diluted in healthy human whole blood (red) after 1 hour of detection. Samples were heated for 5 minutes at 50° C. plus 5 minutes at 64° C. with 100 mM TCEP and 1 mM EDTA. The same PBS control was used in FIG. 104A and FIG. 104B as the experiments were performed together. Error bars indicate 1 S.D. based on 3 technical replicates.

[0138] FIG. 109—graph illustrating body-temperature heat inactivation of bodily fluids. Healthy human whole blood, serum, saliva, and urine were diluted as indicated and inactivated at 37° C. for 20 minutes with 100 mM TCEP and 1 mM EDTA. RNase activity was measured using RNase Alert v2 (Thermo) in the presence of 2 U/μl Murine RNase inhibitor (NEB) after 1 hour of incubation at 37° C. Two technical replicates are shown for each condition (orange and black bars).

[0139] FIG. 110—graphs illustrating detection of dengue virus diluted in whole blood, serum, and saliva. Detection of DENV RNA in particles diluted in healthy human whole blood (red, A), serum (pink, B), or healthy human saliva (blue, C) after 1 hour of detection. Samples were heated for 20 minutes at 37° C. plus 5 minutes at 64° C. for inactivation with 100 mM TCEP and 1 mM EDTA. The same PBS controls used in all panels as the experiments were performed together. DENV titers in focus-forming units per ml (FFU/ml) are indicated. Error bars indicate 1 S.D. based on 3 technical replicates.

[0140] FIG. 111—shows bar plots of Dengue clinical sample RNA serotypes. (A-D) SHERLOCK DENV panel for differentiating serotypes tested with extracted RNA from 1 DENV1 sample (A), 2 DENV2 samples and 2 samples with presence of DENV2 and DENV3 (B), 4 DENV3 samples (C), and 3 DENV4 samples (D). Fluorescence values are shown after 3 hours of Cas13 detection. Error bars indicate 1 S.D. based on 3 technical replicates.

[0141] FIG. 112—illustrates identification of adaptive and functional ZIKV mutations. (A) SHERLOCK assays for SNP identification. Dark colors: derived crRNAs, light colors: ancestral crRNAs. (B-C) Three region-specific SNPs from the 2015-2016 ZIKV pandemic, including genomic locations of the SNPs and a simplified phylogenetic tree, tested using synthetic targets (104 cp/μl) and viral seedstock cDNA (3×10² cp/μl). (D-E) Identification of region-specific SNPs in ZIKV cDNA samples from the Dominican Republic (DOM), United States (USA), and Honduras (HND). The fluorescence ratio (derived crRNA fluorescence divided by ancestral crRNA fluorescence) for each SNP in each sample is shown in a bar plot (log 2-transformed data in a heatmap). (F) Timeline for developing a SHERLOCK assay for a new SNP (more detail in FIG. 113). (G-H) Identification of a microcephaly-associated ZIKV mutation (PrM S139N) by fluorescent and colorimetric detection. In all panels, error bars indicate 1 S.D. based on 3 technical replicates.

[0142] FIG. 113—illustrates the SNP design timeline. We show the steps required to design, build, and test a SHERLOCK-based SNP identification assay, along with the hands-on time required for each step. The total turnaround time is less than 1 week.

[0143] FIG. 114—illustrates lateral flow detection of Zika virus diluted in urine with a visual readout. We show lateral flow detection of Zika virus diluted in urine (FIG. 104C). The top band is the test band and the bottom band is the control band. A faint band is visible at 10 copies per microliter in both PBS and urine dilutions after 1 hour of detection.

### DETAILED DESCRIPTION OF THE EXAMPLE EMBODIMENTS

### General Definitions

[0144] Unless defined otherwise, technical and scientific terms used herein have the same meaning as commonly understood by one of ordinary skill in the art to which this disclosure pertains. Definitions of common terms and techniques in molecular biology may be found in Molecular Cloning: A Laboratory Manual, 2^{nd} edition (1989) (Sambrook, Fritsch, and Maniatis); Molecular Cloning: A Laboratory Manual, 4^{th} edition (2012) (Green and Sambrook); Current Protocols in Molecular Biology (1987) (F. M. Ausubel et al. eds.); the series Methods in Enzymology (Academic Press, Inc.): PCR 2: A Practical Approach (1995) (M. J. MacPherson, B. D. Hames, and G. R. Taylor eds.): Antibodies, A Laboratory Manual (1988) (Harlow and Lane, eds.): Antibodies A Laboratory Manual, 2^{nd} edition 2013 (E. A. Greenfield ed.); Animal Cell Culture (1987) (R. I. Freshney, ed.); Benjamin Lewin, Genes IX, published by Jones and Bartlet, 2008 (ISBN 0763752223); Kendrew et al. (eds.), The Encyclopedia of Molecular Biology, published by Blackwell Science Ltd., 1994 (ISBN 0632021829); Robert A. Meyers (ed.), Molecular Biology and Biotechnology: a Comprehensive Desk Reference, published by VCH Publishers, Inc., 1995 (ISBN 9780471185710); Singleton et al., Dictionary of Microbiology and Molecular Biology 2nd ed., J. Wiley & Sons (New York, N.Y. 1994), March, Advanced Organic Chemistry Reactions, Mechanisms and Structure 4th ed., John Wiley & Sons (New York, N.Y. 1992); and Marten H. Hofker and Jan van Deursen, Transgenic Mouse Methods and Protocols, 2^{nd} edition (2011)

[0145] As used herein, the singular forms “a”, “an”, and “the” include both singular and plural referents unless the context clearly dictates otherwise.

[0146] The term “optional” or “optionally” means that the subsequent described event, circumstance or substituent may or may not occur, and that the description includes instances where the event or circumstance occurs and instances where it does not.

[0147] The recitation of numerical ranges by endpoints includes all numbers and fractions subsumed within the respective ranges, as well as the recited endpoints.

[0148] The terms “about” or “approximately” as used herein when referring to a measurable value such as a parameter, an amount, a temporal duration, and the like, are meant to encompass variations of and from the specified value, such as variations of +/−10% or less, +/−5% or less, +/−1% or less, and +/−0.1% or less of and from the specified value, insofar such variations are appropriate to perform in the disclosed invention. It is to be understood that the value to which the modifier “about” or “approximately” refers is itself also specifically, and preferably, disclosed.

[0149] Reference throughout this specification to “one embodiment”, “an embodiment,” “an example embodiment,” means that a particular feature, structure or characteristic described in connection with the embodiment is included in at least one embodiment of the present invention. Thus, appearances of the phrases “in one embodiment,” “in an embodiment,” or “an example embodiment” in various places throughout this specification are not necessarily all referring to the same embodiment, but may. Furthermore, the particular features, structures or characteristics may be combined in any suitable manner, as would be apparent to a person skilled in the art from this disclosure, in one or more embodiments. Furthermore, while some embodiments described herein include some but not other features included in other embodiments, combinations of features of different embodiments are meant to be within the scope of the invention. For example, in the appended claims, any of the claimed embodiments can be used in any combination.

[0150] All publications, published patent documents, and patent applications cited herein are hereby incorporated by reference to the same extent as though each individual publication, published patent document, or patent application was specifically and individually indicated as being incorporated by reference.

### Overview

[0151] Microbial Clustered Regularly Interspaced Short Palindromic Repeats (CRISPR) and CRISPR-associated (CRISPR-Cas) adaptive immune systems contain programmable endonucleases, such as Cas9 and Cpf1 (Shmakov et al., 2017; Zetsche et al., 2015). Although both Cas9 and Cpf1 target DNA, single effector RNA-guided RNases have been recently discovered (Shmakov et al., 2015) and characterized (Abudayyeh et al., 2016; Smargon et al., 2017), including C2c2, providing a platform for specific RNA sensing. RNA-guided RNases can be easily and conveniently reprogrammed using CRISPR RNA (crRNAs) to cleave target RNAs. Unlike the DNA endonucleases Cas9 and Cpf1, which cleave only its DNA target, RNA-guided RNases, like C2c2, remains active after cleaving its RNA target, leading to “collateral” cleavage of non-targeted RNAs in proximity (Abudayyeh et al., 2016). This crRNA-programmed collateral RNA cleavage activity presents the opportunity to use RNA-guided RNases to detect the presence of a specific RNA by triggering in vivo programmed cell death or in vitro nonspecific RNA degradation that can serve as a readout (Abudayyeh et al., 2016; East-Seletsky et al., 2016).

[0152] The embodiments disclosed herein utilized RNA targeting effectors to provide a robust CRISPR-based diagnostic with attomolar sensitivity. Embodiments disclosed herein can detect broth DNA and RNA with comparable levels of sensitivity and can differentiate targets from non-targets based on single base pair differences. Moreover, the embodiments disclosed herein can be prepared in freeze-dried format for convenient distribution and point-of-care (POC) applications. Such embodiments are useful in multiple scenarios in human health including, for example, viral detection, bacterial strain typing, sensitive genotyping, and detection of disease-associated cell free DNA.

[0153] To diagnose infectious microbes around the world, there is a need for assays that are fast, sensitive, low-cost, user-friendly, and rapidly adaptable to detect newly-identified agents. The embodiments disclosed herein demonstrate the Cas13-based SHERLOCK platform can detect Zika virus (ZIKV) in clinical samples and mosquito pools with single-copy sensitivity, and show it can detect ZIKV directly from urine in <2 hours. Applicants further developed assays to simultaneously detect 4 Flaviviruses, to differentiate between Dengue virus serotypes 1-4, and to distinguish strains of ZIKV from the 2016 outbreak using region-specific variants. Finally, Applicants developed and tested an assay to identify a ZIKV variant associated with fetal microcephaly within 1 week of its publication. This demonstrates that SHERLOCK can detect viruses directly from bodily fluids, distinguish multiple pathogenic viruses, and can be rapidly be updated to identify mutations responsible for clinically important phenotypes.

[0154] In one aspect, the embodiments disclosed herein are directed to a nucleic acid detection system comprising a CRISPR system, one or more guide RNAs designed to bind to corresponding target molecules, a masking construct, and optional amplification reagents to amplify target nucleic acid molecules in a sample. In certain example embodiments, the system may further comprise one or more detection aptamers. The one or more detection aptamers may comprise a RNA polymerase site or primer binding site. The one or more detection aptamers specifically bind one or more target polypeptides and are configured such that the RNA polymerase site or primer binding site is exposed only upon binding of the detection aptamer to a target peptide. Exposure of the RNA polymerase site facilitates generation of a trigger RNA oligonucleotide using the aptamer sequence as a template. Accordingly, in such embodiments the one or more guide RNAs are configured to bind to a trigger RNA.

[0155] In another aspect, the embodiments disclosed herein are directed to a diagnostic device comprising a plurality of individual discrete volumes. Each individual discrete volume comprises a CRISPR effector protein, one or more guide RNAs designed to bind to a corresponding target molecule, and a masking construct. In certain example embodiments, RNA amplification reagents may be pre-loaded into the individual discrete volumes or be added to the individual discrete volumes concurrently with or subsequent to addition of a sample to each individual discrete volume. The device may be a microfluidic based device, a wearable device, or device comprising a flexible material substrate on which the individual discrete volumes are defined.

[0156] In another aspect, the embodiments disclosed herein are directed to a method for detecting target nucleic acids in a sample comprising distributing a sample or set of samples into a set of individual discrete volumes, each individual discrete volume comprising a CRISPR effector protein, one or more guide RNAs designed to bind to one target oligonucleotides, and a masking construct. The set of samples are then maintained under conditions sufficient to allow binding of the one or more guide RNAs to one or more target molecules. Binding of the one or more guide RNAs to a target nucleic acid in turn activates the CRISPR effector protein. Once activated, the CRISPR effector protein then deactivates the masking construct, for example, by cleaving the masking construct such that a detectable positive signal is unmasked, released, or generated. Detection of the positive detectable signal in an individual discrete volume indicates the presence of the target molecules.

[0157] In yet another aspect, the embodiments disclosed herein are directed to a method for detecting polypeptides. The method for detecting polypeptides is similar to the method for detecting target nucleic acids described above. However, a peptide detection aptamer is also included. The peptide detection aptamers function as described above and facilitate generation of a trigger oligonucleotide upon binding to a target polypeptide. The guide RNAs are designed to recognize the trigger oligonucleotides thereby activating the CRISPR effector protein. Deactivation of the masking construct by the activated CRISPR effector protein leads to unmasking, release, or generation of a detectable positive signal.

### CRISPR Effector Proteins

[0158] In general, a CRISPR-Cas or CRISPR system as used in herein and in documents, such as WO 2014/093622 (PCT/US2013/074667), refers collectively to transcripts and other elements involved in the expression of or directing the activity of CRISPR-associated (“Cas”) genes, including sequences encoding a Cas gene, a tracr (trans-activating CRISPR) sequence (e.g. tracrRNA or an active partial tracrRNA), a tracr-mate sequence (encompassing a “direct repeat” and a tracrRNA-processed partial direct repeat in the context of an endogenous CRISPR system), a guide sequence (also referred to as a “spacer” in the context of an endogenous CRISPR system), or “RNA(s)” as that term is herein used (e.g., RNA(s) to guide Cas, such as Cas9, e.g. CRISPR RNA and transactivating (tracr) RNA or a single guide RNA (sgRNA) (chimeric RNA)) or other sequences and transcripts from a CRISPR locus. In general, a CRISPR system is characterized by elements that promote the formation of a CRISPR complex at the site of a target sequence (also referred to as a protospacer in the context of an endogenous CRISPR system). When the CRISPR protein is a C2c2 protein, a tracrRNA is not required. C2c2 has been described in Abudayyeh et al. (2016) “C2c2 is a single-component programmable RNA-guided RNA-targeting CRISPR effector”; Science; DOI: 10.1126/science.aaf5573; and Shmakov et al. (2015) “Discovery and Functional Characterization of Diverse Class 2 CRISPR-Cas Systems”, Molecular Cell, DOI: dx.doi.org/10.1016/j.molcel.2015.10.008; which are incorporated herein in their entirety by reference. Cas13b has been described in Smargon et al. (2017) “Cas13b Is a Type VI-B CRISPR-Associated RNA-Guided RNases Differentially Regulated by Accessory Proteins Csx27 and Csx28,” Molecular Cell. 65, 1-13; dx.doi.org/10.1016/j.molcel.2016.12.023., which is incorporated herein in its entirety by reference.

[0159] In certain embodiments, a protospacer adjacent motif (PAM) or PAM-like motif directs binding of the effector protein complex as disclosed herein to the target locus of interest. In some embodiments, the PAM may be a 5′ PAM (i.e., located upstream of the 5′ end of the protospacer). In other embodiments, the PAM may be a 3′ PAM (i.e., located downstream of the 5′ end of the protospacer). The term “PAM” may be used interchangeably with the term “PFS” or “protospacer flanking site” or “protospacer flanking sequence”.

[0160] In a preferred embodiment, the CRISPR effector protein may recognize a 3′ PAM. In certain embodiments, the CRISPR effector protein may recognize a 3′ PAM which is 5′H, wherein H is A, C or U. In certain embodiments, the effector protein may be Leptotrichia shahii C2c2p, more preferably Leptotrichia shahii DSM 19757 C2c2, and the 3′ PAM is a 5′ H.

[0161] In the context of formation of a CRISPR complex, “target sequence” refers to a sequence to which a guide sequence is designed to have complementarity, where hybridization between a target sequence and a guide sequence promotes the formation of a CRISPR complex. A target sequence may comprise RNA polynucleotides. The term “target RNA” refers to an RNA polynucleotide being or comprising the target sequence. In other words, the target RNA may be a RNA polynucleotide or a part of a RNA polynucleotide to which a part of the gRNA, i.e. the guide sequence, is designed to have complementarity and to which the effector function mediated by the complex comprising CRISPR effector protein and a gRNA is to be directed. In some embodiments, a target sequence is located in the nucleus or cytoplasm of a cell.

[0162] The nucleic acid molecule encoding a CRISPR effector protein, in particular C2c2, is advantageously codon optimized CRISPR effector protein. An example of a codon optimized sequence, is in this instance a sequence optimized for expression in eukaryotes, e.g., humans (i.e. being optimized for expression in humans), or for another eukaryote, animal or mammal as herein discussed; see, e.g., SaCas9 human codon optimized sequence in WO 2014/093622 (PCT/US2013/074667). Whilst this is preferred, it will be appreciated that other examples are possible and codon optimization for a host species other than human, or for codon optimization for specific organs is known. In some embodiments, an enzyme coding sequence encoding a CRISPR effector protein is a codon optimized for expression in particular cells, such as eukaryotic cells. The eukaryotic cells may be those of or derived from a particular organism, such as a plant or a mammal, including but not limited to human, or non-human eukaryote or animal or mammal as herein discussed, e.g., mouse, rat, rabbit, dog, livestock, or non-human mammal or primate. In some embodiments, processes for modifying the germ line genetic identity of human beings and/or processes for modifying the genetic identity of animals which are likely to cause them suffering without any substantial medical benefit to man or animal, and also animals resulting from such processes, may be excluded. In general, codon optimization refers to a process of modifying a nucleic acid sequence for enhanced expression in the host cells of interest by replacing at least one codon (e.g. about or more than about 1, 2, 3, 4, 5, 10, 15, 20, 25, 50, or more codons) of the native sequence with codons that are more frequently or most frequently used in the genes of that host cell while maintaining the native amino acid sequence. Various species exhibit particular bias for certain codons of a particular amino acid. Codon bias (differences in codon usage between organisms) often correlates with the efficiency of translation of messenger RNA (mRNA), which is in turn believed to be dependent on, among other things, the properties of the codons being translated and the availability of particular transfer RNA (tRNA) molecules. The predominance of selected tRNAs in a cell is generally a reflection of the codons used most frequently in peptide synthesis. Accordingly, genes can be tailored for optimal gene expression in a given organism based on codon optimization. Codon usage tables are readily available, for example, at the “Codon Usage Database” available at kazusa.orjp/codon/and these tables can be adapted in a number of ways. See Nakamura, Y., et al. “Codon usage tabulated from the international DNA sequence databases: status for the year 2000” Nucl. Acids Res. 28:292 (2000). Computer algorithms for codon optimizing a particular sequence for expression in a particular host cell are also available, such as Gene Forge (Aptagen; Jacobus, Pa.), are also available. In some embodiments, one or more codons (e.g. 1, 2, 3, 4, 5, 10, 15, 20, 25, 50, or more, or all codons) in a sequence encoding a Cas correspond to the most frequently used codon for a particular amino acid.

[0163] In certain embodiments, the methods as described herein may comprise providing a Cas transgenic cell, in particular a C2c2 transgenic cell, in which one or more nucleic acids encoding one or more guide RNAs are provided or introduced operably connected in the cell with a regulatory element comprising a promoter of one or more gene of interest. As used herein, the term “Cas transgenic cell” refers to a cell, such as a eukaryotic cell, in which a Cas gene has been genomically integrated. The nature, type, or origin of the cell are not particularly limiting according to the present invention. Also, the way the Cas transgene is introduced in the cell may vary and can be any method as is known in the art. In certain embodiments, the Cas transgenic cell is obtained by introducing the Cas transgene in an isolated cell. In certain other embodiments, the Cas transgenic cell is obtained by isolating cells from a Cas transgenic organism. By means of example, and without limitation, the Cas transgenic cell as referred to herein may be derived from a Cas transgenic eukaryote, such as a Cas knock-in eukaryote. Reference is made to WO 2014/093622 (PCT/US13/74667), incorporated herein by reference. Methods of US Patent Publication Nos. 20120017290 and 20110265198 assigned to Sangamo BioSciences, Inc. directed to targeting the Rosa locus may be modified to utilize the CRISPR Cas system of the present invention. Methods of US Patent Publication No. 20130236946 assigned to Cellectis directed to targeting the Rosa locus may also be modified to utilize the CRISPR Cas system of the present invention. By means of further example reference is made to Platt et. al. (Cell; 159(2):440-455 (2014)), describing a Cas9 knock-in mouse, which is incorporated herein by reference. The Cas transgene can further comprise a Lox-Stop-polyA-Lox(LSL) cassette thereby rendering Cas expression inducible by Cre recombinase. Alternatively, the Cas transgenic cell may be obtained by introducing the Cas transgene in an isolated cell. Delivery systems for transgenes are well known in the art. By means of example, the Cas transgene may be delivered in for instance eukaryotic cell by means of vector (e.g., AAV, adenovirus, lentivirus) and/or particle and/or nanoparticle delivery, as also described herein elsewhere.

[0164] It will be understood by the skilled person that the cell, such as the Cas transgenic cell, as referred to herein may comprise further genomic alterations besides having an integrated Cas gene or the mutations arising from the sequence specific action of Cas when complexed with RNA capable of guiding Cas to a target locus.

[0165] In certain aspects the invention involves vectors, e.g. for delivering or introducing in a cell Cas and/or RNA capable of guiding Cas to a target locus (i.e. guide RNA), but also for propagating these components (e.g. in prokaryotic cells). A used herein, a “vector” is a tool that allows or facilitates the transfer of an entity from one environment to another. It is a replicon, such as a plasmid, phage, or cosmid, into which another DNA segment may be inserted so as to bring about the replication of the inserted segment. Generally, a vector is capable of replication when associated with the proper control elements. In general, the term “vector” refers to a nucleic acid molecule capable of transporting another nucleic acid to which it has been linked. Vectors include, but are not limited to, nucleic acid molecules that are single-stranded, double-stranded, or partially double-stranded; nucleic acid molecules that comprise one or more free ends, no free ends (e.g. circular); nucleic acid molecules that comprise DNA, RNA, or both; and other varieties of polynucleotides known in the art. One type of vector is a “plasmid,” which refers to a circular double stranded DNA loop into which additional DNA segments can be inserted, such as by standard molecular cloning techniques. Another type of vector is a viral vector, wherein virally-derived DNA or RNA sequences are present in the vector for packaging into a virus (e.g. retroviruses, replication defective retroviruses, adenoviruses, replication defective adenoviruses, and adeno-associated viruses (AAVs)). Viral vectors also include polynucleotides carried by a virus for transfection into a host cell. Certain vectors are capable of autonomous replication in a host cell into which they are introduced (e.g. bacterial vectors having a bacterial origin of replication and episomal mammalian vectors). Other vectors (e.g., non-episomal mammalian vectors) are integrated into the genome of a host cell upon introduction into the host cell, and thereby are replicated along with the host genome. Moreover, certain vectors are capable of directing the expression of genes to which they are operatively-linked. Such vectors are referred to herein as “expression vectors.” Common expression vectors of utility in recombinant DNA techniques are often in the form of plasmids.

[0166] Recombinant expression vectors can comprise a nucleic acid of the invention in a form suitable for expression of the nucleic acid in a host cell, which means that the recombinant expression vectors include one or more regulatory elements, which may be selected on the basis of the host cells to be used for expression, that is operatively-linked to the nucleic acid sequence to be expressed. Within a recombinant expression vector, “operably linked” is intended to mean that the nucleotide sequence of interest is linked to the regulatory element(s) in a manner that allows for expression of the nucleotide sequence (e.g. in an in vitro transcription/translation system or in a host cell when the vector is introduced into the host cell). With regards to recombination and cloning methods, mention is made of U.S. patent application Ser. No. 10/815,730, published Sep. 2, 2004 as US 2004-0171156 A1, the contents of which are herein incorporated by reference in their entirety. Thus, the embodiments disclosed herein may also comprise transgenic cells comprising the CRISPR effector system. In certain example embodiments, the transgenic cell may function as an individual discrete volume. In other words, samples comprising a masking construct may be delivered to a cell, for example in a suitable delivery vesicle and if the target is present in the delivery vesicle the CRISPR effector is activated and a detectable signal generated.

[0167] The vector(s) can include the regulatory element(s), e.g., promoter(s). The vector(s) can comprise Cas encoding sequences, and/or a single, but possibly also can comprise at least 3 or 8 or 16 or 32 or 48 or 50 guide RNA(s) (e.g., sgRNAs) encoding sequences, such as 1-2, 1-3, 1-4 1-5, 3-6, 3-7, 3-8, 3-9, 3-10, 3-8, 3-16, 3-30, 3-32, 3-48, 3-50 RNA(s) (e.g., sgRNAs). In a single vector there can be a promoter for each RNA (e.g., sgRNA), advantageously when there are up to about 16 RNA(s); and, when a single vector provides for more than 16 RNA(s), one or more promoter(s) can drive expression of more than one of the RNA(s), e.g., when there are 32 RNA(s), each promoter can drive expression of two RNA(s), and when there are 48 RNA(s), each promoter can drive expression of three RNA(s). By simple arithmetic and well established cloning protocols and the teachings in this disclosure one skilled in the art can readily practice the invention as to the RNA(s) for a suitable exemplary vector such as AAV, and a suitable promoter such as the U6 promoter. For example, the packaging limit of AAV is ˜4.7 kb. The length of a single U6-gRNA (plus restriction sites for cloning) is 361 bp. Therefore, the skilled person can readily fit about 12-16, e.g., 13 U6-gRNA cassettes in a single vector. This can be assembled by any suitable means, such as a golden gate strategy used for TALE assembly (genome-engineering.org/taleffectors/). The skilled person can also use a tandem guide strategy to increase the number of U6-gRNAs by approximately 1.5 times, e.g., to increase from 12-16, e.g., 13 to approximately 18-24, e.g., about 19 U6-gRNAs. Therefore, one skilled in the art can readily reach approximately 18-24, e.g., about 19 promoter-RNAs, e.g., U6-gRNAs in a single vector, e.g., an AAV vector. A further means for increasing the number of promoters and RNAs in a vector is to use a single promoter (e.g., U6) to express an array of RNAs separated by cleavable sequences. And an even further means for increasing the number of promoter-RNAs in a vector, is to express an array of promoter-RNAs separated by cleavable sequences in the intron of a coding sequence or gene; and, in this instance it is advantageous to use a polymerase II promoter, which can have increased expression and enable the transcription of long RNA in a tissue specific manner. (see, e.g., nar.oxfordjournals.org/content/34/7/e53.short and nature.com/mt/journal/v16/n9/abs/mt2008144a.html). In an advantageous embodiment, AAV may package U6 tandem gRNA targeting up to about 50 genes. Accordingly, from the knowledge in the art and the teachings in this disclosure the skilled person can readily make and use vector(s), e.g., a single vector, expressing multiple RNAs or guides under the control or operatively or functionally linked to one or more promoters-especially as to the numbers of RNAs or guides discussed herein, without any undue experimentation.

[0168] The guide RNA(s) encoding sequences and/or Cas encoding sequences, can be functionally or operatively linked to regulatory element(s) and hence the regulatory element(s) drive expression. The promoter(s) can be constitutive promoter(s) and/or conditional promoter(s) and/or inducible promoter(s) and/or tissue specific promoter(s). The promoter can be selected from the group consisting of RNA polymerases, pol I, pol II, pol III, T7, U6, H1, retroviral Rous sarcoma virus (RSV) LTR promoter, the cytomegalovirus (CMV) promoter, the SV40 promoter, the dihydrofolate reductase promoter, the (3-actin promoter, the phosphoglycerol kinase (PGK) promoter, and the EF1α promoter. An advantageous promoter is the promoter is U6.

[0169] In some embodiments, one or more elements of a nucleic acid-targeting system is derived from a particular organism comprising an endogenous CRISPR RNA-targeting system. In certain example embodiments, the effector protein CRISPR RNA-targeting system comprises at least one HEPN domain, including but not limited to the HEPN domains described herein, HEPN domains known in the art, and domains recognized to be HEPN domains by comparison to consensus sequence motifs. Several such domains are provided herein. In one non-limiting example, a consensus sequence can be derived from the sequences of C2c2 or Cas13b orthologs provided herein. In certain example embodiments, the effector protein comprises a single HEPN domain. In certain other example embodiments, the effector protein comprises two HEPN domains.

[0170] In one example embodiment, the effector protein comprises one or more HEPN domains comprising a RxxxxH motif sequence. The RxxxxH motif sequence can be, without limitation, from a HEPN domain described herein or a HEPN domain known in the art. RxxxxH motif sequences further include motif sequences created by combining portions of two or more HEPN domains. As noted, consensus sequences can be derived from the sequences of the orthologs disclosed in U.S. Provisional Patent Application 62/432,240 entitled “Novel CRISPR Enzymes and Systems,” U.S. Provisional Patent Application 62/471,710 entitled “Novel Type VI CRISPR Orthologs and Systems” filed on Mar. 15, 2017, and U.S. Provisional Patent Application entitled “Novel Type VI CRISPR Orthologs and Systems,” labeled as attorney docket number 47627-05-2133 and filed on Apr. 12, 2017.

[0171] In an embodiment of the invention, a HEPN domain comprises at least one RxxxxH motif comprising the sequence of R{N/H/K}X1X2X3H. In an embodiment of the invention, a HEPN domain comprises a RxxxxH motif comprising the sequence of R{N/H}X1X2X3H. In an embodiment of the invention, a HEPN domain comprises the sequence of R{N/K}X1X2X3H. In certain embodiments, X1 is R, S, D, E, Q, N, G, Y, or H. In certain embodiments, X2 is I, S, T, V, or L. In certain embodiments, X3 is L, F, N, Y, V, I, S, D, E, or A.

[0172] Additional effectors for use according to the invention can be identified by their proximity to casl genes, for example, though not limited to, within the region 20 kb from the start of the casl gene and 20 kb from the end of the casl gene. In certain embodiments, the effector protein comprises at least one HEPN domain and at least 500 amino acids, and wherein the C2c2 effector protein is naturally present in a prokaryotic genome within 20 kb upstream or downstream of a Cas gene or a CRISPR array. Non-limiting examples of Cas proteins include Cas1, Cas1B, Cas2, Cas3, Cas4, Cas5, Cas6, Cas7, Cas8, Cas9 (also known as Csn1 and Csx12), Cas10, Csy1, Csy2, Csy3, Cse1, Cse2, Csc1, Csc2, Csa5, Csn2, Csm2, Csm3, Csm4, Csm5, Csm6, Cmr1, Cmr3, Cmr4, Cmr5, Cmr6, Csb1, Csb2, Csb3, Csx17, Csx14, Csx10, Csx16, CsaX, Csx3, Csx1, Csx15, Csf1, Csf2, Csf3, Csf4, homologues thereof, or modified versions thereof. In certain example embodiments, the C2c2 effector protein is naturally present in a prokaryotic genome within 20 kb upstream or downstream of a Cas 1 gene. The terms “orthologue” (also referred to as “ortholog” herein) and “homologue” (also referred to as “homolog” herein) are well known in the art. By means of further guidance, a “homologue” of a protein as used herein is a protein of the same species which performs the same or a similar function as the protein it is a homologue of. Homologous proteins may but need not be structurally related, or are only partially structurally related. An “orthologue” of a protein as used herein is a protein of a different species which performs the same or a similar function as the protein it is an orthologue of. Orthologous proteins may but need not be structurally related, or are only partially structurally related

[0173] In particular embodiments, the Type VI RNA-targeting Cas enzyme is C2c2. In other example embodiments, the Type VI RNA-targeting Cas enzyme is Cas 13b. In particular embodiments, the homologue or orthologue of a Type VI protein such as C2c2 as referred to herein has a sequence homology or identity of at least 30%, or at least 40%, or at least 50%, or at least 60%, or at least 70%, or at least 80%, more preferably at least 85%, even more preferably at least 90%, such as for instance at least 95% with a Type VI protein such as C2c2 (e.g., based on the wild-type sequence of any of Leptotrichia shahii C2c2, Lachnospiraceae bacterium MA2020 C2c2, Lachnospiraceae bacterium NK4A179 C2c2, Clostridium aminophilum (DSM 10710) C2c2, Carnobacterium gallinarum (DSM 4847) C2c2, Paludibacter propionicigenes (WB4) C2c2, Listeria weihenstephanensis (FSL R9-0317) C2c2, Listeriaceae bacterium (FSL M6-0635) C2c2, Listeria newyorkensis (FSL M6-0635) C2c2, Leptotrichia wadei (F0279) C2c2, Rhodobacter capsulatus (SB 1003) C2c2, Rhodobacter capsulatus (R121) C2c2, Rhodobacter capsulatus (DE442) C2c2, Leptotrichia wadei (Lw2) C2c2, or Listeria seeligeri C2c2). In further embodiments, the homologue or orthologue of a Type VI protein such as C2c2 as referred to herein has a sequence identity of at least 30%, or at least 40%, or at least 50%, or at least 60%, or at least 70%, or at least 80%, more preferably at least 85%, even more preferably at least 90%, such as for instance at least 95% with the wild type C2c2 (e.g., based on the wild-type sequence of any of Leptotrichia shahii C2c2, Lachnospiraceae bacterium MA2020 C2c2, Lachnospiraceae bacterium NK4A179 C2c2, Clostridium aminophilum (DSM 10710) C2c2, Carnobacterium gallinarum (DSM 4847) C2c2, Paludibacter propionicigenes (WB4) C2c2, Listeria weihenstephanensis (FSL R9-0317) C2c2, Listeriaceae bacterium (FSL M6-0635) C2c2, Listeria newyorkensis (FSL M6-0635) C2c2, Leptotrichia wadei (F0279) C2c2, Rhodobacter capsulatus (SB 1003) C2c2, Rhodobacter capsulatus (R121) C2c2, Rhodobacter capsulatus (DE442) C2c2, Leptotrichia wadei (Lw2) C2c2, or Listeria seeligeri C2c2).

[0174] In certain other example embodiments, the CRISPR system the effector protein is a C2c2 nuclease. The activity of C2c2 may depend on the presence of two HEPN domains. These have been shown to be RNase domains, i.e. nuclease (in particular an endonuclease) cutting RNA. C2c2 HEPN may also target DNA, or potentially DNA and/or RNA. On the basis that the HEPN domains of C2c2 are at least capable of binding to and, in their wild-type form, cutting RNA, then it is preferred that the C2c2 effector protein has RNase function. Regarding C2c2 CRISPR systems, reference is made to U.S. Provisional 62/351,662 filed on Jun. 17, 2016 and U.S. Provisional 62/376,377 filed on Aug. 17, 2016. Reference is also made to U.S. Provisional 62/351,803 filed on Jun. 17, 2016. Reference is also made to U.S. Provisional entitled “Novel Crispr Enzymes and Systems” filed Dec. 8, 2016 bearing Broad Institute No. 10035.PA4 and Attorney Docket No. 47627.03.2133. Reference is further made to East-Seletsky et al. “Two distinct RNase activities of CRISPR-C2c2 enable guide-RNA processing and RNA detection” Nature doi: 10/1038/nature19802 and Abudayyeh et al. “C2c2 is a single-component programmable RNA-guided RNA targeting CRISPR effector” bioRxiv doi:10.1101/054742.

[0175] RNase function in CRISPR systems is known, for example mRNA targeting has been reported for certain type III CRISPR-Cas systems (Hale et al., 2014, Genes Dev, vol. 28, 2432-2443; Hale et al., 2009, Cell, vol. 139, 945-956; Peng et al., 2015, Nucleic acids research, vol. 43, 406-417) and provides significant advantages. In the Staphylococcus epidermis type III-A system, transcription across targets results in cleavage of the target DNA and its transcripts, mediated by independent active sites within the Cas10-Csm ribonucleoprotein effector protein complex (see, Samai et al., 2015, Cell, vol. 151, 1164-1174). A CRISPR-Cas system, composition or method targeting RNA via the present effector proteins is thus provided.

[0176] In an embodiment, the Cas protein may be a C2c2 ortholog of an organism of a genus which includes but is not limited to Leptotrichia, Listeria, Corynebacter, Sutterella, Legionella, Treponema, Filifactor, Eubacterium, Streptococcus, Lactobacillus, Mycoplasma, Bacteroides, Flaviivola, Flavobacterium, Sphaerochaeta, Azospirillum, Gluconacetobacter, Neisseria, Roseburia, Parvibaculum, Staphylococcus, Nitratifractor, Mycoplasma and Campylobacter. Species of organism of such a genus can be as otherwise herein discussed.

[0177] Some methods of identifying orthologues of CRISPR-Cas system enzymes may involve identifying tracr sequences in genomes of interest. Identification of tracr sequences may relate to the following steps: Search for the direct repeats or tracr mate sequences in a database to identify a CRISPR region comprising a CRISPR enzyme. Search for homologous sequences in the CRISPR region flanking the CRISPR enzyme in both the sense and antisense directions. Look for transcriptional terminators and secondary structures. Identify any sequence that is not a direct repeat or a tracr mate sequence but has more than 50% identity to the direct repeat or tracr mate sequence as a potential tracr sequence. Take the potential tracr sequence and analyze for transcriptional terminator sequences associated therewith.

[0178] It will be appreciated that any of the functionalities described herein may be engineered into CRISPR enzymes from other orthologs, including chimeric enzymes comprising fragments from multiple orthologs. Examples of such orthologs are described elsewhere herein. Thus, chimeric enzymes may comprise fragments of CRISPR enzyme orthologs of an organism which includes but is not limited to Leptotrichia, Listeria, Corynebacter, Sutterella, Legionella, Treponema, Filifactor, Eubacterium, Streptococcus, Lactobacillus, Mycoplasma, Bacteroides, Flaviivola, Flavobacterium, Sphaerochaeta, Azospirillum, Gluconacetobacter, Neisseria, Roseburia, Parvibaculum, Staphylococcus, Nitratifractor, Mycoplasma and Campylobacter. A chimeric enzyme can comprise a first fragment and a second fragment, and the fragments can be of CRISPR enzyme orthologs of organisms of genera herein mentioned or of species herein mentioned; advantageously the fragments are from CRISPR enzyme orthologs of different species.

[0179] In embodiments, the C2c2 protein as referred to herein also encompasses a functional variant of C2c2 or a homologue or an orthologue thereof. A “functional variant” of a protein as used herein refers to a variant of such protein which retains at least partially the activity of that protein. Functional variants may include mutants (which may be insertion, deletion, or replacement mutants), including polymorphs, etc. Also included within functional variants are fusion products of such protein with another, usually unrelated, nucleic acid, protein, polypeptide or peptide. Functional variants may be naturally occurring or may be man-made. Advantageous embodiments can involve engineered or non-naturally occurring Type VI RNA-targeting effector protein.

[0180] In an embodiment, nucleic acid molecule(s) encoding the C2c2 or an ortholog or homolog thereof, may be codon-optimized for expression in a eukaryotic cell. A eukaryote can be as herein discussed. Nucleic acid molecule(s) can be engineered or non-naturally occurring.

[0181] In an embodiment, the C2c2 or an ortholog or homolog thereof, may comprise one or more mutations (and hence nucleic acid molecule(s) coding for same may have mutation(s). The mutations may be artificially introduced mutations and may include but are not limited to one or more mutations in a catalytic domain. Examples of catalytic domains with reference to a Cas9 enzyme may include but are not limited to RuvC I, RuvC II, RuvC III and HNH domains.

[0182] In an embodiment, the C2c2 or an ortholog or homolog thereof, may comprise one or more mutations. The mutations may be artificially introduced mutations and may include but are not limited to one or more mutations in a catalytic domain. Examples of catalytic domains with reference to a Cas enzyme may include but are not limited to HEPN domains.

[0183] In an embodiment, the C2c2 or an ortholog or homolog thereof, may be used as a generic nucleic acid binding protein with fusion to or being operably linked to a functional domain. Exemplary functional domains may include but are not limited to translational initiator, translational activator, translational repressor, nucleases, in particular ribonucleases, a spliceosome, beads, a light inducible/controllable domain or a chemically inducible/controllable domain.

[0184] In certain example embodiments, the C2c2 effector protein may be from an organism selected from the group consisting of; Leptotrichia, Listeria, Corynebacter, Sutterella, Legionella, Treponema, Filifactor, Eubacterium, Streptococcus, Lactobacillus, Mycoplasma, Bacteroides, Flaviivola, Flavobacterium, Sphaerochaeta, Azospirillum, Gluconacetobacter, Neisseria, Roseburia, Parvibaculum, Staphylococcus, Nitratifractor, Mycoplasma, and Campylobacter.

[0185] In certain embodiments, the effector protein may be a Listeria sp. C2c2p, preferably Listeria seeligeria C2c2p, more preferably Listeria seeligeria serovar 1/2b str. SLCC3954 C2c2p and the crRNA sequence may be 44 to 47 nucleotides in length, with a 5′ 29-nt direct repeat (DR) and a 15-nt to 18-nt spacer.

[0186] In certain embodiments, the effector protein may be a Leptotrichia sp. C2c2p, preferably Leptotrichia shahii C2c2p, more preferably Leptotrichia shahii DSM 19757 C2c2p and the crRNA sequence may be 42 to 58 nucleotides in length, with a 5′ direct repeat of at least 24 nt, such as a 5′ 24-28-nt direct repeat (DR) and a spacer of at least 14 nt, such as a 14-nt to 28-nt spacer, or a spacer of at least 18 nt, such as 19, 20, 21, 22, or more nt, such as 18-28, 19-28, 20-28, 21-28, or 22-28 nt.

[0187] In certain example embodiments, the effector protein may be a Leptotrichia sp., Leptotrichia wadei F0279, or a Listeria sp., preferably Listeria newyorkensis FSL M6-0635.

[0188] In certain example embodiments, the C2c2 effector proteins of the invention include, without limitation, the following 21 ortholog species (including multiple CRISPR loci: Leptotrichia shahii; Leptotrichia wadei (Lw2); Listeria seeligeri; Lachnospiraceae bacterium MA2020; Lachnospiraceae bacterium NK4A179; [Clostridium] aminophilum DSM 10710; Carnobacterium gallinarum DSM 4847; Carnobacterium gallinarum DSM 4847 (second CRISPR Loci); Paludibacter propionicigenes WB4; Listeria weihenstephanensis FSL R9-0317; Listeriaceae bacterium FSL M6-0635; Leptotrichia wadei F0279; Rhodobacter capsulatus SB 1003; Rhodobacter capsulatus R121; Rhodobacter capsulatus DE442; Leptotrichia buccalis C-1013-b; Herbinix hemicellulosilytica; [Eubacterium] rectale; Eubacteriaceae bacterium CHKCI004; Blautia sp. Marseille-P2398; and Leptotrichia sp. oral taxon 879 str. F0557. Twelve (12) further non-limiting examples are: Lachnospiraceae bacterium NK4A144; Chloroflexus aggregans; Demequina aurantiaca; Thalassospira sp. TSL5-1; Pseudobutyrivibrio sp. OR37; Butyrivibrio sp. YAB3001; Blautia sp. Marseille-P2398; Leptotrichia sp. Marseille-P3007; Bacteroides ihuae; Porphyromonadaceae bacterium KH3CP3RA; Listeria riparia; and Insolitispirillum peregrinum.

[0189] In certain embodiments, the C2c2 protein according to the invention is or is derived from one of the orthologues as described in the table below, or is a chimeric protein of two or more of the orthologues as described in the table below, or is a mutant or variant of one of the orthologues as described in the table below (or a chimeric mutant or variant), including dead C2c2, split C2c2, destabilized C2c2, etc. as defined herein elsewhere, with or without fusion with a heterologous/functional domain.

[0190] In certain example embodiments, the C2c2 effector protein is selected from Table 1 below. (SEQ. ID. Nos. 600-615 also included)

TABLE 1

| C2c2 orthologue | Code | Multi Letter |
|---|---|---|
| Leptotrichia shahii (SEQ ID. No. 580) | C2-2 | Lsh |
| L. wadei F0279 (Lw2) (SEQ I.D. No. 581) | C2-3 | Lw2 |
| Listeria seeligeri (SEQ I.D. No. 582 | C2-4 | Lse |
| Lachnospiraceae bacterium MA2020 (SEQ I.D. | C2-5 | LbM |
| No. 583) | | |
| Lachnospiraceae bacterium NK4A179 (SEQ | C2-6 | LbNK179 |
| I.D. No. 584) | | |
| Clostridium aminophilum DSM 10710 (SEQ | C2-7 | Ca |
| I.D. No. 585) | | |
| Carnobacterium gallinarum DSM 4847 (SEQ | C2-8 | Cg |
| I.D. No. 586) | | |
| Carnobacterium gallinarum DSM 4847 (SEQ | C2-9 | Cg2 |
| I.D. No. 587 | | |
| Paludibacter propionicigenes WB4 (SEQ I.D. | C2-10 | Pp |
| No. 588) | | |
| Listeria weihenstephanensis FSL R9-0317 | C2-11 | Lwei |
| (SEQ I.D. No. X589 | | |
| Listeriaceae bacterium FSL M6-0635 (SEQ | C2-12 | LbFSL |
| I.D. No. 590) | | |
| Leptotrichia wadei F0279 (SEQ I.D. No. 591 | C2-13 | Lw |
| Rhodobacter capsulatus SB 1003 (SEQ I.D. | C2-14 | Rc |
| No. 592) | | |
| Rhodobacter capsulatus R121 (SEQ I.D. No. | C2-15 | Rc |
| 593) | | |
| Rhodobacter capsulatus DE442 (SEQ I.D. No. | C2-16 | Rc |
| 594) | | |
| Leptotrichia buccalis C-1013-b (SEQ I.D. No. | C2-17 | LbuC2c2 |
| 595) | | |
| Herbinix hemicellulosilytics (SEQ I.D. No. | C2-18 | HheC2c2 |
| 596) | | |
| Eubacterium rectale (SEQ I.D. No. 597) | C2-19 | EreC2c2 |
| Eubacteriaceae bacterium CHKC1004 (SEQ | C2-20 | EbaC2c2 |
| I.D. No. 598) | | |
| Blautia sp. Marseille-P2398 (SEQ I.D. No. | C2-21 | BsmC2c2 |
| 599) | | |
| Leptotrichia sp. oral taxon 879 str. F0557 (SEQ | C2-22 | LspC2c2 |
| I.D. No. 579) | | |
| Lachnospiraceae bacterium NK4a144 (SEQ | | |
| I.D. No. 313) | | |
| Chloroflexus aggregans (SEQ. I.D. No. 314) | | |
| Demequina aurantiaca (SEQ. I.D. No. 315) | | |
| Thalassospira sp. TSL5-1 (SEQ. I.D. No. 316) | | |
| Pseudobutyrivibrio sp. OR37 (SEQ. I.D. No. | | |
| 317) | | |
| Butyrivibrio sp. YAB3001 (SEQ. I.D. No. 318) | | |
| Blautia sp. Marseille-P2398 (SEQ. I.D. No. | | |
| 478) | | |
| Leptotrichia sp. Marseille-P300 (SEQ. I.D. No. | | |
| 320) | | |
| Bacteroides ihuae (SEQ. I.D. No. 321) | | |
| Porphyromonadaceae bacterium KH3CP3RA | | |
| (SEQ. I.D. No. 322) | | |
| Listeria riparia (SEQ. I.D. No. 323) | | |
| Insolitispirillum peregrinum (SEQ. I.D. No. | | |
| 324) | | |

[0191] The wild type protein sequences of the above species are listed in Table 2 below. In certain embodiments, a nucleic acid sequence encoding the C2c2 protein is provided.

TABLE 2

| | | |
|---|---|---|
| C2c2-2 | | L. shahii (Lsh) (SEQ. I.D. No. 1) |
| c2c2-3 | | L. wadei (Lw2) (SEQ. I.D. No. 2) |
| c2c2-4 | | Listeria seeligeri (SEQ. I.D. No. 3) |
| c2c2-5 | 1 | Lachnospiraceae bacterium MA2020 (SEQ. I.D. No. 4) |
| c2c2-6 | 2 | Lachnospiraceae bacterium NK4A179 (SEQ. I.D. No. 5) |
| c2c2-7 | 3 | Clostridium aminophilum DSM 10710 (SEQ. I.D. No. 6) |
| c2c2-8 | 5 | Carnobacterium gallinarum DSM 4847 (SEQ. I.D. No. 7) |
| c2c2-9 | 6 | Carnobacterium gallinarum DSM 4847 (SEQ. I.D. No. 8) |
| c2c2-10 | 7 | Paludibacter propionicigenes WB4 (SEQ. I.D. No. 9) |
| c2c2-11 | 9 | Listeria weihenstephanensis FSL R9-0317 (SEQ. I.D. No. 10) |
| c2c2-12 | 10 | Listeriaceae bacterium FSL M6-0635 = Listeria newyorkensis FSL |
| | | M6-0635 (SEQ. I.D. No. 11) |
| c2c2-13 | 12 | Leptotrichia wadei F0279 (SEQ. I.D. No. 12) |
| c2c2-14 | 15 | Rhodobacter capsulatus SB 1003 (SEQ. I.D. No. 13) |
| c2c2-15 | 16 | Rhodobacter capsulatus R121 (SEQ. I.D. No. 14) |
| c2c2-16 | 17 | Rhodobacter capsulatus DE442 (SEQ. I.D. No. 15) |
| LbuC2c2 | | Leptorichia buccalis C-1013-b (SEQ ID NO: 309) |
| HheC2c2 | | Herbinix hemicellulosilytica (SEQ ID NO: 310) |
| EreC2c2 | | Eubacterium rectale (SEQ ID NO: 311) |
| EbaC2C2 | | Eubacteriaceae bacterium CHKCI004 (SEQ ID NO: 312) |
| C2c2 NK4A144 | | Lachnospiraceae bacterium NK4A144 (SEQ. ID. No. 313) |
| C2c2 Chloro_agg | | RNA-binding protein S1 Chloroflexus aggregans (SEQ. ID. No. 314) |
| C2c2 Dem_Aur | | Demequina aurantiaca (SEQ. ID. No. 315) |
| C2c2 Thal_Sp_TSL5 | | Thalassospira sp. TSL5-1 (SEQ. ID. No. 316) |
| C2c2 Pseudo_sp | | Pseudobutyrivibrio sp. OR37 (SEQ. ID. No. 317) |
| C2c2_Buty_sp | | Butyrivibrio sp. YAB3001 (SEQ. ID. No. 318) |
| C2c2_Blautia_sp | | Blautia sp. Marseille-P2398 (SEQ. ID. No. 478) |
| C2c2_Lepto_sp_Marseille | | Leptotrichia sp. Marseille-P3007 (SEQ. ID. No. 320) |
| C2c2_Bacteroides_ihuae | | Bacteroides ihuae (SEQ. ID. No. 321) |
| C2c2_Porph_bacterium | | Porphyromonadaceae bacterium KH3CP3RA(SEQ. ID. No. 322) |
| C2c2_Listeria_riparia | | Listeria riparia(SEQ. ID. No. 323) |
| C2c2_insolitis_peregrinum | | Insolitispirillum peregrinum(SEQ. ID. No. 324) |

[0192] In an embodiment of the invention, there is provided effector protein which comprises an amino acid sequence having at least 80% sequence homology to the wild-type sequence of any of Leptotrichia shahii C2c2, Lachnospiraceae bacterium MA2020 C2c2, Lachnospiraceae bacterium NK4A179 C2c2, Clostridium aminophilum (DSM 10710) C2c2, Carnobacterium gallinarum (DSM 4847) C2c2, Paludibacter propionicigenes (WB4) C2c2, Listeria weihenstephanensis (FSL R9-0317) C2c2, Listeriaceae bacterium (FSL M6-0635) C2c2, Listeria newyorkensis (FSL M6-0635) C2c2, Leptotrichia wadei (F0279) C2c2, Rhodobacter capsulatus (SB 1003) C2c2, Rhodobacter capsulatus (R121) C2c2, Rhodobacter capsulatus (DE442) C2c2, Leptotrichia wadei (Lw2) C2c2, or Listeria seeligeri C2c2.

[0193] In an embodiment of the invention, the effector protein comprises an amino acid sequence having at least 80% sequence homology to a Type VI effector protein consensus sequence including but not limited to a consensus sequence described herein According to the invention, a consensus sequence can be generated from multiple C2c2 orthologs, which can assist in locating conserved amino acid residues, and motifs, including but not limited to catalytic residues and HEPN motifs in C2c2 orthologs that mediate C2c2 function. One such consensus sequence, generated from the 33 orthologs mentioned above using Geneious alignment is SEQ ID NO: 325.

[0194] In another non-limiting example, a sequence alignment tool to assist generation of a consensus sequence and identification of conserved residues is the MUSCLE alignment tool (www.ebi.ac.uk/Tools/msa/muscle/). For example, using MUSCLE, the following amino acid locations conserved among C2c2 orthologs can be identified in Leptotrichia wadei C2c2:K2; K5; V6; E301; L331; 1335; N341; G351; K352; E375; L392; L396; D403; F446; 1466; 1470; R474 (HEPN); H475; H479 (HEPN), E508; P556; L561; 1595; Y596; F600; Y669; 1673; F681; L685; Y761; L676; L779; Y782; L836; D847; Y863; L869; 1872; K879; 1933; L954; 1958; R961; Y965; E970; R971; D972; R1046 (HEPN), H1051 (HEPN), Y1075; D1076; K1078; K1080; 11083; 11090.

[0195] An exemplary sequence alignment of HEPN domains showing highly conserved residues is shown in FIG. 50

[0196] In certain example embodiments, the RNA-targeting effector protein is a Type VI-B effector protein, such as Cas13b and Group 29 or Group 30 proteins. In certain example embodiments, the RNA-targeting effector protein comprises one or more HEPN domains. In certain example embodiments, the RNA-targeting effector protein comprises a C-terminal HEPN domain, a N-terminal HEPN domain, or both. Regarding example Type VI-B effector proteins that may be used in the context of this invention, reference is made to U.S. application Ser. No. 15/331,792 entitled “Novel CRISPR Enzymes and Systems” and filed Oct. 21, 2016, International Patent Application No. PCT/US2016/058302 entitled “Novel CRISPR Enzymes and Systems”, and filed Oct. 21, 2016, and Smargon et al. “Cas13b is a Type VI-B CRISPR-associated RNA-Guided RNase differentially regulated by accessory proteins Csx27 and Csx28” Molecular Cell, 65, 1-13 (2017); dx.doi.org/10.1016/j.molcel.2016.12.023, and U.S. Provisional Application No. to be assigned, entitled “Novel Cas13b Orthologues CRISPR Enzymes and System” filed Mar. 15, 2017. In particular embodiments, the Cas13b enzyme is derived from Bergeyella zoohelcum. In certain other example embodiments, the effector protein is, or comprises an amino acid sequence having at least 80% sequence homology to any of the sequences listed in Table 3. (SEQ. ID. Nos. 479-566 also referenced)

TABLE 3

| | |
|---|---|
| Bergeyella zoohelcum | 1 (SEQ. ID. No. 326) |
| Prevotella intermedia | 2 (SEQ. ID. No. 327) |
| Prevotella buccae | 3 (SEQ. ID. No. 328) |
| Porphyromonas gingivalis | 4 (SEQ. ID. No. 329) |
| Bacteroides pyogenes | 5 (SEQ. ID. No. 330) |
| Alistipes sp. ZOR0009 | 6 (SEQ. ID. No. 331) |
| Prevotella sp. MA2016 | 7a (SEQ. ID. No. 332) |
| Prevotella sp. MA2016 | 7b (SEQ. ID. No. 333) |
| Riemerella anatipestifer | 8 (SEQ. ID. No. 334) |
| Prevotella aurantiaca | 9 (SEQ. ID. No. 335) |
| Prevotella saccharolytica | 10 (SEQ. ID. No. 336) |
| HMPREF9712_03108 [Myroides odoratimimus CCUG 10230] | 11 (SEQ. ID. No. 337) |
| Prevotella intermedia | 12 (SEQ. ID. No. 338) |
| Capnocytophaga canimorsus | 13 (SEQ. ID. No. 339) |
| Porphyromonas gulae | 14 (SEQ. ID. No. 340) |
| Prevotella sp. P5-125 | 15 (SEQ. ID. No. 341) |
| Flavobacterium branchiophilum | 16 (SEQ. ID. No. 342) |
| Myroides odoratimimus | 17 (SEQ. ID. No. 343) |
| Flavobacterium columnare | 18 (SEQ. ID. No. 344) |
| Porphyromonas gingivalis | 19 (SEQ. ID. No. 345) |
| Porphyromonas sp. COT-052 OH4946 | 20 (SEQ. ID. No. 346) |
| Prevotella intermedia | 21 (SEQ. ID. No. 347) |
| PIN17_0200 [Prevotella intermedia 17] | AFJ07523 (SEQ. ID. No. 348) |
| Prevotella intermedia | BAU18625 (SEQ. ID. No. 349) |
| HMPREF6485_0083 [Prevotella buccae ATCC 33574] | EFU31981 (SEQ. ID. No. 350) |
| HMPREF9144_1146 [Prevotella pallens ATCC 700821] | EGQ18444 (SEQ. id. No. 351) |
| HMPREF9714_02132 [Myroides odoratimimus CCUG 12901] | EHO08761 (SEQ. ID. No. 352) |
| HMPREF9711_00870 [Myroides odoratimimus CCUG 3837] | EKB06014 (SEQ. ID. No. 353) |
| HMPREF9699_02005 [Bergeyella zoohelcum ATCC 43767] | EKB54193 (SEQ. ID. No. 354) |
| HMPREF9151_01387 [Prevotella saccharolytica F0055] | EKY00089 (SEQ. ID. No. 355) |
| A343_1752 [Porphyromonas gingivalis JCVI SC001] | EOA10535 (SEQ. ID. No. 356) |
| HMPREF1981_03090 [Bacteroides pyogenes F0041] | ERI81700 (SEQ. ID. No. 357) |
| HMPREF1553_02065 [Porphyromonas gingivalis F0568] | ERJ65637 (SEQ. ID. No. 358) |
| HMPREF1988_01768 [Porphyromonas gingivalis F0185] | ERJ81987 (SEQ. ID. No. 359) |
| HMPREF1990_01800 [Porphyromonas gingivalis W4087] | ERJ87335 (SEQ. ID. No. 360) |
| M573_117042 [Prevotella intermedia ZT] | KJJ86756 (SEQ. ID. No. 361) |
| A2033_10205 [Bacteroidetes bacterium GWA2_31_9] | OFX18020.1 (SEQ. ID. No 362) |
| SAMN05421542_0666 [Chryseobacterium jejuense] | SDI27289.1 (SEQ. ID. No 363) |
| SAMN05444360_11366 [Chryseobacterium | SHM52812.1 (SEQ. ID. No. 364) |
| carnipullorum] | |
| SAMN05421786_1011119 [Chryseobacterium | SIS70481.1 (SEQ. ID. No. 365) |
| ureilyticum] | |
| Prevotella buccae | WP_004343581 (SEQ. ID. No. 366) |
| Porphyromonas gingivalis | WP_005873511 (SEQ. ID. No. 367) |
| Porphyromonas gingivalis | WP_005874195 (SEQ. ID. No. 368) |
| Prevotella pallens | WP_006044833 (SEQ. ID. No. 369) |
| Myroides odoratimimus | WP_006261414 (SEQ. ID. No. 370) |
| Myroides odoratimimus | WP_006265509 (SEQ. ID. No. 371) |
| Prevotella sp. MSX73 | WP_007412163 (SEQ. ID. No. 372) |
| Porphyromonas gingivalis | WP_012458414 (SEQ. ID. No. 373) |
| Paludibacter propionicigenes | WP_013446107 (SEQ. ID. No. 374) |
| Porphyromonas gingivalis | WP_013816155 (SEQ. ID. No. 375) |
| Flavobacterium columnare | WP_014165541 (SEQ. ID. No. 376) |
| Psychroflexus torquis | WP_015024765 (SEQ. ID. No. 377) |
| Riemerella anatipestifer | WP_015345620 (SEQ. ID. No. 378) |
| Prevotella pleuritidis | WP_021584635 (SEQ. ID. No. 379) |
| Porphyromonas gingivalis | WP_021663197 (SEQ. ID. No. 380) |
| Porphyromonas gingivalis | WP_021665475 (SEQ. ID. No. 381) |
| Porphyromonas gingivalis | WP_021677657 (SEQ. ID. No. 382) |
| Porphyromonas gingivalis | WP_021680012 (SEQ. ID. No. 383) |
| Porphyromonas gingivalis | WP_023846767 (SEQ. ID. No. 384) |
| Prevotella falsenii | WP_036884929 (SEQ. ID. No. 385) |
| Prevotella pleuritidis | WP_036931485 (SEQ. ID. No. 386) |
| [Porphyromonas gingivalis | WP_039417390 (SEQ. ID. No. 387) |
| Porphyromonas gulae | WP_039418912 (SEQ. ID. No. 388) |
| Porphyromonas gulae | WP_039419792 (SEQ. ID. No. 389) |
| Porphyromonas gulae | WP_039426176 (SEQ. ID. No. 390) |
| Porphyromonas gulae | WP_039431778 (SEQ. ID. No. 391) |
| Porphyromonas gulae | WP_039437199 (SEQ. ID. No. 392) |
| Porphyromonas gulae | WP_039442171 (SEQ. ID. No. 393) |
| Porphyromonas gulae | WP_039445055 (SEQ. ID. No. 394) |
| Capnocytophaga cynodegmi | WP_041989581 (SEQ. ID. No. 395) |
| Prevotella sp. P5-119 | WP_042518169 (SEQ. ID. No. 396) |
| Prevotella sp. P4-76 | WP_044072147 (SEQ. ID. No. 397) |
| Prevotella sp. P5-60 | WP_044074780 (SEQ. ID. No. 398) |
| Phaeodactylibacter xiamenensis | WP_044218239 (SEQ. ID. No. 399) |
| Flavobacterium sp. 316 | WP_045968377 (SEQ. ID. No. 400) |
| Porphyromonas gulae | WP_046201018 (SEQ. ID. No. 401) |
| WP_047431796 | Chryseobacterium sp. YR477 (SEQ. ID. No. 402) |
| Riemerella anatipestifer | WP_049354263 (SEQ. ID. No. 403) |
| Porphyromonas gingivalis | WP_052912312 (SEQ. ID. No. 404) |
| Porphyromonas gingivalis | WP_058019250 (SEQ. ID. No. 405) |
| Flavobacterium columnare | WP_060381855 (SEQ. ID. No. 406) |
| Porphyromonas gingivalis | WP_061156470 (SEQ. ID. No. 407) |
| Porphyromonas gingivalis | WP_061156637 (SEQ. ID. No. 408) |
| Riemerella anatipestifer | WP_061710138 (SEQ. ID. No. 409) |
| Flavobacterium columnare | WP_063 744070 (SEQ. ID. No. 410) |
| Riemerella anatipestifer | WP_064970887 (SEQ. ID. No. 411) |
| Sinomicrobium oceani | WP_072319476.1 (SEQ. ID. No. 412) |
| Reichenbachiella agariperforans | WP_073124441.1 (SEQ. ID. No. 413) |

[0197] In certain example embodiments, the Class 2 type VI CRISPR system is a Cas13c system. In certain example embodiments, the Cas13c orthologue is selected from Table 4 below, which comprises Cas13c orthologues for expression in mammalian cells.

TABLE 4
Fusobacterium necrophorum subsp. funduliforme ATCC 51357 contig00003
(SEQ. ID. No. 616)
Fusobacterium necrophorum DJ-2 contig0065, whole genome shotgun sequence
(SEQ. ID. No. 617)
Fusobacterium necrophorum BFTR-1 contig0068
(SEQ. ID. No. 618)
Fusobacterium necrophorum subsp. funduliforme 1_1_36S cont1.14
(SEQ. ID. No. 619)
Fusobacterium perfoetens ATCC 29250 T364DRAFT_scaffold00009.9_C
(SEQ. ID. No. 620)
Fusobacterium ulcerans ATCC 49185 cont2.38
(SEQ. ID. No. 621)
Anaerosalibacter sp. ND1 genome assembly Anaerosalibacter massiliensis ND1
(SEQ. ID. No. 622)

[0198] In certain example embodiments, the RNA-targeting effector protein is a Cas13c effector protein as disclosed in U.S. Provisional Patent Application No. 62/525,165 filed Jun. 26, 2017, and PCT Application No. US 2017/047193 filed Aug. 16, 2017. Example wildtype orthologue sequences of Cas13c are provided in Table 5 below.

TABLE 5
Name

EHO19081 (SEQ. ID. No. 567)
WP_094899336 (SEQ. ID. No. 568)
WP_040490876 (SEQ. ID. No. 569)
WP_047396607 (SEQ. ID. No. 570)
WP_035935671 (SEQ. ID. No. 571)
WP_035906563 (SEQ. ID. No. 572)
WP_042678931 (SEQ. ID. No. 573)
WP_062627846 (SEQ. ID. No. 574)
WP_005959231 (SEQ. ID. No. 575)
WP_027128616 (SEQ. ID. No. 576)
WP_062624740 (SEQ. ID. No. 577)
WP_096402050 (SEQ. ID. No. 578)

### Guide RNAs

[0199] As used herein, the term “crRNA” or “guide RNA” or “single guide RNA,” “gRNA” refers to a polynucleotide comprising any polynucleotide sequence having sufficient complementarity with a target nucleic acid sequence to hybridize with the target nucleic acid sequence and to direct sequence-specific binding of a RNA-targeting complex comprising the gRNA and a CRISPR effector protein to the target nucleic acid sequence. In general, a gRNA may be any polynucleotide sequence (i) being able to form a complex with a CRISPR effector protein and (ii) comprising a sequence having sufficient complementarity with a target polynucleotide sequence to hybridize with the target sequence and direct sequence-specific binding of a CRISPR complex to the target sequence. As used herein the term “capable of forming a complex with the CRISPR effector protein” refers to the gRNA having a structure that allows specific binding by the CRISPR effector protein to the gRNA such that a complex is formed that is capable of binding to a target RNA in a sequence specific manner and that can exert a function on said target RNA. Structural components of the gRNA may include direct repeats and a guide sequence (or spacer). The sequence specific binding to the target RNA is mediated by a part of the gRNA, the “guide sequence”, being complementary to the target RNA. In embodiments of the invention the term guide RNA, i.e. RNA capable of guiding Cas to a target locus, is used as in foregoing cited documents such as WO 2014/093622 (PCT/US2013/074667). As used herein the term “wherein the guide sequence is capable of hybridizing” refers to a subsection of the gRNA having sufficient complementarity to the target sequence to hybridize thereto and to mediate binding of a CRISPR complex to the target RNA. In general, a guide sequence is any polynucleotide sequence having sufficient complementarity with a target polynucleotide sequence to hybridize with the target sequence and direct sequence-specific binding of a CRISPR complex to the target sequence. In some embodiments, the degree of complementarity between a guide sequence and its corresponding target sequence, when optimally aligned using a suitable alignment algorithm, is about or more than about 50%, 60%, 75%, 80%, 85%, 90%, 95%, 97.5%, 99%, or more. Optimal alignment may be determined with the use of any suitable algorithm for aligning sequences, non-limiting example of which include the Smith-Waterman algorithm, the Needleman-Wunsch algorithm, algorithms based on the Burrows-Wheeler Transform (e.g. the Burrows Wheeler Aligner), ClustalW, Clustal X, BLAT, Novoalign (Novocraft Technologies; available at novocraft.com), ELAND (Illumina, San Diego, Calif.), SOAP (available at soap.genomics.org.cn), and Maq (available at maq. sourceforge.net).

[0200] In certain embodiments, the CRISPR system as provided herein can make use of a crRNA or analogous polynucleotide comprising a guide sequence, wherein the polynucleotide is an RNA, a DNA or a mixture of RNA and DNA, and/or wherein the polynucleotide comprises one or more nucleotide analogs. The sequence can comprise any structure, including but not limited to a structure of a native crRNA, such as a bulge, a hairpin or a stem loop structure. In certain embodiments, the polynucleotide comprising the guide sequence forms a duplex with a second polynucleotide sequence which can be an RNA or a DNA sequence.

[0201] In certain embodiments, use is made of chemically modified guide RNAs. Examples of guide RNA chemical modifications include, without limitation, incorporation of 2′-O-methyl (M), 2′-O-methyl 3′phosphorothioate (MS), or 2′-O-methyl 3′thioPACE (MSP) at one or more terminal nucleotides. Such chemically modified guide RNAs can comprise increased stability and increased activity as compared to unmodified guide RNAs, though on-target vs. off-target specificity is not predictable. (See, Hendel, 2015, Nat Biotechnol. 33(9):985-9, doi: 10.1038/nbt.3290, published online 29 Jun. 2015). Chemically modified guide RNAs further include, without limitation, RNAs with phosphorothioate linkages and locked nucleic acid (LNA) nucleotides comprising a methylene bridge between the 2′ and 4′ carbons of the ribose ring.

[0202] In some embodiments, a guide sequence is about or more than about 5, 10, 11, 12, 13, 14, 15, 16, 17, 18, 19, 20, 21, 22, 23, 24, 25, 26, 27, 28, 29, 30, 35, 40, 45, 50, 75, or more nucleotides in length. In some embodiments, a guide sequence is less than about 75, 50, 45, 40, 35, 30, 25, 20, 15, 12, or fewer nucleotides in length. Preferably the guide sequence is 10 to 30 nucleotides long. The ability of a guide sequence to direct sequence-specific binding of a CRISPR complex to a target sequence may be assessed by any suitable assay. For example, the components of a CRISPR system sufficient to form a CRISPR complex, including the guide sequence to be tested, may be provided to a host cell having the corresponding target sequence, such as by transfection with vectors encoding the components of the CRISPR sequence, followed by an assessment of preferential cleavage within the target sequence, such as by Surveyor assay. Similarly, cleavage of a target RNA may be evaluated in a test tube by providing the target sequence, components of a CRISPR complex, including the guide sequence to be tested and a control guide sequence different from the test guide sequence, and comparing binding or rate of cleavage at the target sequence between the test and control guide sequence reactions. Other assays are possible, and will occur to those skilled in the art.

[0203] A guide sequence, and hence a nucleic acid-targeting guide RNA may be selected to target any target nucleic acid sequence. In the context of formation of a CRISPR complex, “target sequence” refers to a sequence to which a guide sequence is designed to have complementarity, where hybridization between a target sequence and a guide sequence promotes the formation of a CRISPR complex. A target sequence may comprise RNA polynucleotides. The term “target RNA” refers to a RNA polynucleotide being or comprising the target sequence. In other words, the target RNA may be a RNA polynucleotide or a part of a RNA polynucleotide to which a part of the gRNA, i.e. the guide sequence, is designed to have complementarity and to which the effector function mediated by the complex comprising CRISPR effector protein and a gRNA is to be directed. In some embodiments, a target sequence is located in the nucleus or cytoplasm of a cell. The target sequence may be DNA. The target sequence may be any RNA sequence. In some embodiments, the target sequence may be a sequence within a RNA molecule selected from the group consisting of messenger RNA (mRNA), pre-mRNA, ribosomal RNA (rRNA), transfer RNA (tRNA), micro-RNA (miRNA), small interfering RNA (siRNA), small nuclear RNA (snRNA), small nuclear RNA (snoRNA), double stranded RNA (dsRNA), non coding RNA (ncRNA), long non-coding RNA (lncRNA), and small cytoplasmic RNA (scRNA). In some preferred embodiments, the target sequence may be a sequence within a RNA molecule selected from the group consisting of mRNA, pre-mRNA, and rRNA. In some preferred embodiments, the target sequence may be a sequence within a RNA molecule selected from the group consisting of ncRNA, and lncRNA. In some more preferred embodiments, the target sequence may be a sequence within an mRNA molecule or a pre-mRNA molecule.

[0204] In some embodiments, a nucleic acid-targeting guide RNA is selected to reduce the degree of secondary structure within the RNA-targeting guide RNA. In some embodiments, about or less than about 75%, 50%, 40%, 30%, 25%, 20%, 15%, 10%, 5%, 1%, or fewer of the nucleotides of the nucleic acid-targeting guide RNA participate in self-complementary base pairing when optimally folded. Optimal folding may be determined by any suitable polynucleotide folding algorithm. Some programs are based on calculating the minimal Gibbs free energy. An example of one such algorithm is mFold, as described by Zuker and Stiegler (Nucleic Acids Res. 9 (1981), 133-148). Another example folding algorithm is the online webserver RNAfold, developed at Institute for Theoretical Chemistry at the University of Vienna, using the centroid structure prediction algorithm (see e.g., A. R. Gruber et al., 2008, Cell 106(1): 23-24; and PA Carr and GM Church, 2009, Nature Biotechnology 27(12): 1151-62).

[0205] In certain embodiments, a guide RNA or crRNA may comprise, consist essentially of, or consist of a direct repeat (DR) sequence and a guide sequence or spacer sequence. In certain embodiments, the guide RNA or crRNA may comprise, consist essentially of, or consist of a direct repeat sequence fused or linked to a guide sequence or spacer sequence. In certain embodiments, the direct repeat sequence may be located upstream (i.e., 5′) from the guide sequence or spacer sequence. In other embodiments, the direct repeat sequence may be located downstream (i.e., 3′) from the guide sequence or spacer sequence.

[0206] In certain embodiments, the crRNA comprises a stem loop, preferably a single stem loop. In certain embodiments, the direct repeat sequence forms a stem loop, preferably a single stem loop.

[0207] In certain embodiments, the spacer length of the guide RNA is from 15 to 35 nt. In certain embodiments, the spacer length of the guide RNA is at least 15 nucleotides, preferably at least 18 nt, such as at least 19, 20, 21, 22, or more nt. In certain embodiments, the spacer length is from 15 to 17 nt, e.g., 15, 16, or 17 nt, from 17 to 20 nt, e.g., 17, 18, 19, or 20 nt, from 20 to 24 nt, e.g., 20, 21, 22, 23, or 24 nt, from 23 to 25 nt, e.g., 23, 24, or 25 nt, from 24 to 27 nt, e.g., 24, 25, 26, or 27 nt, from 27-30 nt, e.g., 27, 28, 29, or 30 nt, from 30-35 nt, e.g., 30, 31, 32, 33, 34, or 35 nt, or 35 nt or longer.

[0208] In certain embodiments, the spacer length of the guide RNA is less than 28 nucleotides. In certain embodiments, the spacer length of the guide RNA is at least 18 nucleotides and less than 28 nucleotides. In certain embodiments, the spacer length of the guide RNA is between 19 and 28 nucleotides. In certain embodiments, the spacer length of the guide RNA is between 19 and 25 nucleotides. In certain embodiments, the spacer length of the guide RNA is 20 nucleotides. In certain embodiments, the spacer length of the guide RNA is 23 nucleotides. In certain embodiments, the spacer length of the guide RNA is 25 nucleotides.

[0209] In a classic CRISPR-Cas systems, the degree of complementarity between a guide sequence and its corresponding target sequence can be about or more than about 50%, 60%, 75%, 80%, 85%, 90%, 95%, 97.5%, 99%, or 100%; a guide or RNA or sgRNA can be about or more than about 5, 10, 11, 12, 13, 14, 15, 16, 17, 18, 19, 20, 21, 22, 23, 24, 25, 26, 27, 28, 29, 30, 35, 40, 45, 50, 75, or more nucleotides in length; or guide or RNA or sgRNA can be less than about 75, 50, 45, 40, 35, 30, 25, 20, 15, 12, or fewer nucleotides in length. However, an aspect of the invention is to reduce off-target interactions, e.g., reduce the guide interacting with a target sequence having low complementarity. Indeed, in the examples, it is shown that the invention involves mutations that result in the CRISPR-Cas system being able to distinguish between target and off-target sequences that have greater than 80% to about 95% complementarity, e.g., 83%-84% or 88-89% or 94-95% complementarity (for instance, distinguishing between a target having 18 nucleotides from an off-target of 18 nucleotides having 1, 2 or 3 mismatches). Accordingly, in the context of the present invention the degree of complementarity between a guide sequence and its corresponding target sequence is greater than 94.5% or 95% or 95.5% or 96% or 96.5% or 97% or 97.5% or 98% or 98.5% or 99% or 99.5% or 99.9%, or 100%. Off target is less than 100% or 99.9% or 99.5% or 99% or 99% or 98.5% or 98% or 97.5% or 97% or 96.5% or 96% or 95.5% or 95% or 94.5% or 94% or 93% or 92% or 91% or 90% or 89% or 88% or 87% or 86% or 85% or 84% or 83% or 82% or 81% or 80% complementarity between the sequence and the guide, with it advantageous that off target is 100% or 99.9% or 99.5% or 99% or 99% or 98.5% or 98% or 97.5% or 97% or 96.5% or 96% or 95.5% or 95% or 94.5% complementarity between the sequence and the guide.

[0210] In certain embodiments, modulations of cleavage efficiency can be exploited by introduction of mismatches, e.g. 1 or more mismatches, such as 1 or 2 mismatches between spacer sequence and target sequence, including the position of the mismatch along the spacer/target. The more central (i.e. not 3′ or 5′) for instance a double mismatch is, the more cleavage efficiency is affected. Accordingly, by choosing mismatch position along the spacer, cleavage efficiency can be modulated. By means of example, if less than 100% cleavage of targets is desired (e.g. in a cell population), 1 or more, such as preferably 2 mismatches between spacer and target sequence may be introduced in the spacer sequences. The more central along the spacer of the mismatch position, the lower the cleavage percentage.

[0211] In certain example embodiments, the cleavage efficiency may be exploited to design single guides that can distinguish two or more targets that vary by a single nucleotide, such as a single nucleotide polymorphism (SNP), variation, or (point) mutation. The CRISPR effector may have reduced sensitivity to SNPs (or other single nucleotide variations) and continue to cleave SNP targets with a certain level of efficiency. Thus, for two targets, or a set of targets, a guide RNA may be designed with a nucleotide sequence that is complementary to one of the targets i.e. the on-target SNP. The guide RNA is further designed to have a synthetic mismatch. As used herein a “synthetic mismatch” refers to a non-naturally occurring mismatch that is introduced upstream or downstream of the naturally occurring SNP, such as at most 5 nucleotides upstream or downstream, for instance 4, 3, 2, or 1 nucleotide upstream or downstream, preferably at most 3 nucleotides upstream or downstream, more preferably at most 2 nucleotides upstream or downstream, most preferably 1 nucleotide upstream or downstream (i.e. adjacent the SNP). When the CRISPR effector binds to the on-target SNP, only a single mismatch will be formed with the synthetic mismatch and the CRISPR effector will continue to be activated and a detectable signal produced. When the guide RNA hybridizes to an off-target SNP, two mismatches will be formed, the mismatch from the SNP and the synthetic mismatch, and no detectable signal generated. Thus, the systems disclosed herein may be designed to distinguish SNPs within a population. For, example the systems may be used to distinguish pathogenic strains that differ by a single SNP or detect certain disease specific SNPs, such as but not limited to, disease associated SNPs, such as without limitation cancer associated SNPs.

[0212] In certain embodiments, the guide RNA is designed such that the SNP is located on position 1, 2, 3, 4, 5, 6, 7, 8, 9, 10, 11, 12, 13, 14, 15, 16, 17, 18, 19, 20, 21, 22, 23, 24, 25, 26, 27, 28, 29, or 30 of the spacer sequence (starting at the 5′ end). In certain embodiments, the guide RNA is designed such that the SNP is located on position 1, 2, 3, 4, 5, 6, 7, 8, or 9 of the spacer sequence (starting at the 5′ end). In certain embodiments, the guide RNA is designed such that the SNP is located on position 2, 3, 4, 5, 6, or 7 of the spacer sequence (starting at the 5′ end). In certain embodiments, the guide RNA is designed such that the SNP is located on position 3, 4, 5, or 6 of the spacer sequence (starting at the 5′ end). In certain embodiments, the guide RNA is designed such that the SNP is located on position 3 of the spacer sequence (starting at the 5′ end).

[0213] In certain embodiments, the guide RNA is designed such that the mismatch (e.g.the synthetic mismatch, i.e. an additional mutation besides a SNP) is located on position 1, 2, 3, 4, 5, 6, 7, 8, 9, 10, 11, 12, 13, 14, 15, 16, 17, 18, 19, 20, 21, 22, 23, 24, 25, 26, 27, 28, 29, or 30 of the spacer sequence (starting at the 5′ end). In certain embodiments, the guide RNA is designed such that the mismatch is located on position 1, 2, 3, 4, 5, 6, 7, 8, or 9 of the spacer sequence (starting at the 5′ end). In certain embodiments, the guide RNA is designed such that the mismatch is located on position 4, 5, 6, or 7 of the spacer sequence (starting at the 5′ end. In certain embodiments, the guide RNA is designed such that the mismatch is located on position 5 of the spacer sequence (starting at the 5′ end).

[0214] In certain embodiments, the guide RNA is designed such that the mismatch is located 2 nucleotides upstream of the SNP (i.e. one intervening nucleotide).

[0215] In certain embodiments, the guide RNA is designed such that the mismatch is located 2 nucleotides downstream of the SNP (i.e. one intervening nucleotide).

[0216] In certain embodiments, the guide RNA is designed such that the mismatch is located on position 5 of the spacer sequence (starting at the 5′ end) and the SNP is located on position 3 of the spacer sequence (starting at the 5′ end).

[0217] The embodiments described herein comprehend inducing one or more nucleotide modifications in a eukaryotic cell (in vitro, i.e. in an isolated eukaryotic cell) as herein discussed comprising delivering to cell a vector as herein discussed. The mutation(s) can include the introduction, deletion, or substitution of one or more nucleotides at each target sequence of cell(s) via the guide(s) RNA(s). The mutations can include the introduction, deletion, or substitution of 1-75 nucleotides at each target sequence of said cell(s) via the guide(s) RNA(s). The mutations can include the introduction, deletion, or substitution of 1, 5, 10, 11, 12, 13, 14, 15, 16, 17, 18, 19, 20, 21, 22, 23, 24, 25, 26, 27, 28, 29, 30, 35, 40, 45, 50, or 75 nucleotides at each target sequence of said cell(s) via the guide(s) RNA(s). The mutations can include the introduction, deletion, or substitution of 5, 10, 11, 12, 13, 14, 15, 16, 17, 18, 19, 20, 21, 22, 23, 24, 25, 26, 27, 28, 29, 30, 35, 40, 45, 50, or 75 nucleotides at each target sequence of said cell(s) via the guide(s) RNA(s). The mutations include the introduction, deletion, or substitution of 10, 11, 12, 13, 14, 15, 16, 17, 18, 19, 20, 21, 22, 23, 24, 25, 26, 27, 28, 29, 30, 35, 40, 45, 50, or 75 nucleotides at each target sequence of said cell(s) via the guide(s) RNA(s). The mutations can include the introduction, deletion, or substitution of 20, 21, 22, 23, 24, 25, 26, 27, 28, 29, 30, 35, 40, 45, 50, or 75 nucleotides at each target sequence of said cell(s) via the guide(s) RNA(s). The mutations can include the introduction, deletion, or substitution of 40, 45, 50, 75, 100, 200, 300, 400 or 500 nucleotides at each target sequence of said cell(s) via the guide(s) RNA(s).

[0218] Typically, in the context of an endogenous CRISPR system, formation of a CRISPR complex (comprising a guide sequence hybridized to a target sequence and complexed with one or more Cas proteins) results in cleavage in or near (e.g. within 1, 2, 3, 4, 5, 6, 7, 8, 9, 10, 20, 50, or more base pairs from) the target sequence, but may depend on for instance secondary structure, in particular in the case of RNA targets.

### RNA-Based Masking Constructs

[0219] As used herein, a “masking construct” refers to a molecule that can be cleaved or otherwise deactivated by an activated CRISPR system effector protein described herein. The term “masking construct” may also be referred to in the alternative as a “detection construct.” In certain example embodiments, the masking construct is a RNA-based masking construct. The masking construct prevents the generation or detection of a positive detectable signal. A positive detectable signal may be any signal that can be detected using optical, fluorescent, chemiluminescent, electrochemical or other detection methods known in the art. The masking construct may prevent the generation of a detectable positive signal or mask the presence of a detectable positive signal until the masking construct is removed or otherwise silenced. The term “positive detectable signal” is used to differentiate from other detectable signals that may be detectable in the presence of the masking construct. For example, in certain embodiments a first signal may be detected when the masking agent is present (i.e. a negative detectable signal), which then converts to a second signal (e.g. the positive detectable signal) upon detection of the target molecules and cleavage or deactivation of the masking agent by the activated CRISPR effector protein.

[0220] In certain example embodiments, the masking construct may suppress generation of a gene product. The gene product may be encoded by a reporter construct that is added to the sample. The masking construct may be an interfering RNA involved in a RNA interference pathway, such as a shRHN or siRNA. The masking construct may also comprise microRNA (miRNA). While present, the masking construct suppresses expression of the gene product. The gene product may be a fluorescent protein or other RNA transcript or proteins that would otherwise be detectable by a labeled probe or antibody but for the presence of the masking construct. Upon activation of the effector protein the masking construct is cleaved or otherwise silenced allowing for expression and detection of the gene product as the positive detectable signal.

[0221] In certain example embodiments, the masking construct may sequester one or more reagents needed to generate a detectable positive signal such that release of the one or more reagents from the masking construct results in generation of the detectable positive signal. The one or more reagents may combine to produce a colorimetric signal, a chemiluminescent signal, a fluorescent signal, or any other detectable signal and may comprise any reagents known to be suitable for such a purpose. In certain example embodiments, the one or more reagents are sequestered by RNA aptamers that bind the one or more reagents. The one or more reagents are released when the effector protein is activated upon detection of a target molecule. In certain example embodiments, the one or more reagents is a protein, such as an enzyme, capable of facilitating generation of a detectable signal, such as a colorimetric, chemiluminescent, or fluorescent signal, that is inhibited or sequestered such that the protein cannot generate the detectable signal by the binding of one or more RNA aptamers to the protein. Upon activation of the effector proteins disclosed herein, the RNA aptamers are cleaved or degraded to the extent they no longer inhibit the protein's ability to generate the detectable signal. In certain example embodiments, the aptamer is a thrombin inhibitor aptamer. In certain example embodiments the thrombin inhibitor aptamer has a sequence of GGGAACAAAGCUGAAGUACUUACCC (SEQ ID NO: 414). When this aptamer is cleaved, thrombin will become active and will cleave a peptide colorimetric or fluorescent substrate. In certain example embodiments, the colorimetric substrate is para-nitroanilide (pNA) covalently linked to the peptide substrate for thrombin. Upon cleavage by thrombin, pNA is released and becomes yellow in color and easily visible to the eye. In certain example embodiments, the fluorescent substrate is 7-amino-4-methylcoumarin a blue fluorophore that can be detected using a fluorescence detector. Inhibitory aptamers may also be used for horseradish peroxidase (HRP), beta-galactosidase, or calf alkaline phosphatase (CAP) within the general principals laid out above.

[0222] In certain embodiments, RNAse activity is detected colorimetrically via cleavage of enzyme-inhibiting aptamers. One potential mode of converting RNAse activity into a colorimetric signal is to couple the cleavage of an RNA aptamer with the re-activation of an enzyme that is capable of producing a colorimetric output. In the absence of RNA cleavage, the intact aptamer will bind to the enzyme target and inhibit its activity. The advantage of this readout system is that the enzyme provides an additional amplification step: once liberated from an aptamer via collateral activity (e.g. Cas13a collateral activity), the colorimetric enzyme will continue to produce colorimetric product, leading to a multiplication of signal.

[0223] In certain embodiments, an existing aptamer that inhibits an enzyme with a colorimetric readout is used. Several aptamer/enzyme pairs with colorimetric readouts exist, such as thrombin, protein C, neutrophil elastase, and substilisin. These proteases have colorimetric substrates based upon pNA and are commercially available. In certain embodiments, a novel aptamer targeting a common colorimetric enzyme is used. Common and robust enzymes, such as beta-galactosidase, horseradish peroxidase, or calf intestinal alkaline phosphatase, could be targeted by engineered aptamers designed by selection strategies such as SELEX. Such strategies allow for quick selection of aptamers with nanomolar binding efficiencies and could be used for the development of additional enzyme/aptamer pairs for colorimetric readout.

[0224] In certain embodiments, RNAse activity is detected colorimetrically via cleavage of RNA-tethered inhibitors. Many common colorimetric enzymes have competitive, reversible inhibitors: for example, beta-galactosidase can be inhibited by galactose. Many of these inhibitors are weak, but their effect can be increased by increases in local concentration. By linking local concentration of inhibitors to RNAse activity, colorimetric enzyme and inhibitor pairs can be engineered into RNAse sensors. The colorimetric RNAse sensor based upon small-molecule inhibitors involves three components: the colorimetric enzyme, the inhibitor, and a bridging RNA that is covalently linked to both the inhibitor and enzyme, tethering the inhibitor to the enzyme. In the uncleaved configuration, the enzyme is inhibited by the increased local concentration of the small molecule; when the RNA is cleaved (e.g. by Cas13a collateral cleavage), the inhibitor will be release and the colorimetric enzyme will be activated.

[0225] In certain embodiments, RNAse activity is detected colorimetrically via formation and/or activation of G-quadruplexes. G quadraplexes in DNA can complex with heme (iron (III)-protoporphyrin IX) to form a DNAzyme with peroxidase activity. When supplied with a peroxidase substrate (e.g. ABTS: (2,2′-Azinobis [3-ethylbenzothiazoline-6-sulfonic acid]-diammonium salt)), the G-quadraplex-heme complex in the presence of hydrogen peroxide causes oxidation of the substrate, which then forms a green color in solution. An example G-quadraplex forming DNA sequence is: GGGTAGGGCGGGTTGGGA (SEQ. ID. No. 415). By hybridizing an RNA sequence to this DNA aptamer, formation of the G-quadraplex structure will be limited. Upon RNAse collateral activation (e.g. C2c2-complex collateral activation), the RNA staple will be cleaved allowing the G quadraplex to form and heme to bind. This strategy is particularly appealing because color formation is enzymatic, meaning there is additional amplification beyond RNAse activation.

[0226] In certain example embodiments, the masking construct may be immobilized on a solid substrate in an individual discrete volume (defined further below) and sequesters a single reagent. For example, the reagent may be a bead comprising a dye. When sequestered by the immobilized reagent, the individual beads are too diffuse to generate a detectable signal, but upon release from the masking construct are able to generate a detectable signal, for example by aggregation or simple increase in solution concentration. In certain example embodiments, the immobilized masking agent is a RNA-based aptamer that can be cleaved by the activated effector protein upon detection of a target molecule.

[0227] In certain other example embodiments, the masking construct binds to an immobilized reagent in solution thereby blocking the ability of the reagent to bind to a separate labeled binding partner that is free in solution. Thus, upon application of a washing step to a sample, the labeled binding partner can be washed out of the sample in the absence of a target molecule. However, if the effector protein is activated, the masking construct is cleaved to a degree sufficient to interfere with the ability of the masking construct to bind the reagent thereby allowing the labeled binding partner to bind to the immobilized reagent. Thus, the labeled binding partner remains after the wash step indicating the presence of the target molecule in the sample. In certain aspects, the masking construct that binds the immobilized reagent is a RNA aptamer. The immobilized reagent may be a protein and the labeled minding partner may be a labeled antibody. Alternatively, the immobilized reagent may be a streptavidin and the labeled binding partner may be labeled biotin. The label on the binding partner used in the above embodiments may be any detectable label known in the art. In addition, other known binding partners may be used in accordance with the overall design described here.

[0228] In certain example embodiments, the masking construct may comprise a ribozyme. Ribozymes are RNA molecules having catalytic properties. As ribozymes, both naturally and engineered, comprise or consist of RNA, that may be targeted by the effector proteins disclosed herein. The ribozyme may be selected or engineered to catalyze a reaction that either generates a negative detectable signal or prevents generation of a positive control signal. Upon deactivation of the ribozyme by the activated effector protein molecule the reaction generating a negative controls signal or preventing generation of a positive detectable signal is removed, thereby allowing a positive detectable signal to be detected. In one example embodiment, the ribozyme may catalyze a colorimetric reaction causing a solution to appear as a first color. When the ribozyme is deactivated the solution then turns to a second color, the second color being the detectable positive signal. An example of how ribozymes can be used to catalyze a colorimetric reaction are described in Zhao et al. “Signal amplification of glucosamine-6-phosphate based on ribozyme glmS,” Biosens Bioelectron. 2014; 16:337-42, and provide an example of how such a system could be modified to work in the context of the embodiments disclosed herein. Alternatively, ribozymes, when present can generate cleavage products of, for example, RNA transcripts. Thus, detection of a positive detectable signal may comprise detection of non-cleaved RNA transcripts that are only generated in the absence of the ribozyme.

[0229] In one example embodiment, the masking construct comprises a detection agent that changes color depending on whether the detection agent is aggregated or dispersed in solution. For example, certain nanoparticles, such as colloidal gold, undergo a visible purple to red color shift as they move from aggregates to dispersed particles. Accordingly, in certain example embodiments, such detection agents may be held in aggregate by one or more bridge molecules. See e.g. FIG. 43. At least a portion of the bridge molecule comprises RNA. Upon activation of the effector proteins disclosed herein, the RNA portion of the bridge molecule is cleaved allowing the detection agent to disperse and resulting in the corresponding change in color. See e.g. FIG. 45. In certain example embodiments the, bridge molecule is a RNA molecule. In certain example embodiments, the detection agent is a colloidal metal. The colloidal metal material may include water-insoluble metal particles or metallic compounds dispersed in a liquid, a hydrosol, or a metal sol. The colloidal metal may be selected from the metals in groups IA, IB, IIB and IIIB of the periodic table, as well as the transition metals, especially those of group VIII. Preferred metals include gold, silver, aluminum, ruthenium, zinc, iron, nickel and calcium. Other suitable metals also include the following in all of their various oxidation states: lithium, sodium, magnesium, potassium, scandium, titanium, vanadium, chromium, manganese, cobalt, copper, gallium, strontium, niobium, molybdenum, palladium, indium, tin, tungsten, rhenium, platinum, and gadolinium. The metals are preferably provided in ionic form, derived from an appropriate metal compound, for example the Al3+, Ru3+, Zn2+, Fe3+, Ni2+ and Ca2+ ions.

[0230] When the RNA bridge is cut by the activated CRISPR effector, the beforementioned color shift is observed. In certain example embodiments the particles are colloidal metals. In certain other example embodiments, the colloidal metal is a colloidal gold. In certain example embodiments, the colloidal nanoparticles are 15 nm gold nanoparticles (AuNPs). Due to the unique surface properties of colloidal gold nanoparticles, maximal absorbance is observed at 520 nm when fully dispersed in solution and appear red in color to the naked eye. Upon aggregation of AuNPs, they exhibit a red-shift in maximal absorbance and appear darker in color, eventually precipitating from solution as a dark purple aggregate. In certain example embodiments the nanoparticles are modified to include DNA linkers extending from the surface of the nanoparticle. Individual particles are linked together by single-stranded RNA (ssRNA) bridges that hybridize on each end of the RNA to at least a portion of the DNA linkers. Thus, the nanoparticles will form a web of linked particles and aggregate, appearing as a dark precipitate. Upon activation of the CRISPR effectors disclosed herein, the ssRNA bridge will be cleaved, releasing the AU NPS from the linked mesh and producing a visible red color. Example DNA linkers and RNA bridge sequences are listed below. Thiol linkers on the end of the DNA linkers may be used for surface conjugation to the AuNPS. Other forms of conjugation may be used. In certain example embodiments, two populations of AuNPs may be generated, one for each DNA linker. This will help facilitate proper binding of the ssRNA bridge with proper orientation. In certain example embodiments, a first DNA linker is conjugated by the 3′ end while a second DNA linker is conjugated by the 5′ end.

TABLE 6

| | |
|---|---|
| C2c2 colorimetric | TTATAACTATTCCTAAAAAAAAAAA/ |
| DNA1 | 3ThioMC3-D/(SEQ. I.D. No. 183) |
| C2c2 colorimetric | /5ThioMC6-D/AAAAAAAAAACTCCCCTAA |
| DNA2 | TAACAAT (SEQ. I.D. No. 184) |
| C2c2 colorimetric | GGGUAGGAAUAGUUAUAAUUUCCCUUUCCCAU |
| bridge | UGUUAUUAGGGAG (SEQ. I.D. No. 185) |

[0231] In some embodiments, one or more elements of a nucleic acid-targeting system is derived from a particular organism comprising an endogenous CRISPR RNA-targeting system. In certain embodiments, the CRISPR RNA-targeting system is found in Eubacterium and Ruminococcus. In certain embodiments, the effector protein comprises targeted and collateral ssRNA cleavage activity. In certain embodiments, the effector protein comprises dual HEPN domains. In certain embodiments, the effector protein lacks a counterpart to the Helical-1 domain of Cas13a. In certain embodiments, the effector protein is smaller than previously characterized class 2 CRISPR effectors, with a median size of 928 aa. This median size is 190 aa (17%) less than that of Cas13c, more than 200 aa (18%) less than that of Cas13b, and more than 300 aa (26%) less than that of Cas13a. In certain embodiments, the effector protein has no requirement for a flanking sequence (e.g., PFS, PAM).

[0232] In certain embodiments, the effector protein locus structures include a WYL domain containing accessory protein (so denoted after three amino acids that were conserved in the originally identified group of these domains; see, e.g., WYL domain IPR026881). In certain embodiments, the WYL domain accessory protein comprises at least one helix-turn-helix (HTH) or ribbon-helix-helix (RHH) DNA-binding domain. In certain embodiments, the WYL domain containing accessory protein increases both the targeted and the collateral ssRNA cleavage activity of the RNA-targeting effector protein. In certain embodiments, the WYL domain containing accessory protein comprises an N-terminal RHH domain, as well as a pattern of primarily hydrophobic conserved residues, including an invariant tyrosine-leucine doublet corresponding to the original WYL motif. In certain embodiments, the WYL domain containing accessory protein is WYL1. WYL1 is a single WYL-domain protein associated primarily with Ruminococcus.

[0233] In other example embodiments, the Type VI RNA-targeting Cas enzyme is Cas 13d. In certain embodiments, Cas13d is Eubacterium siraeum DSM 15702 (EsCas13d) or Ruminococcus sp. N15.MGS-57 (RspCas13d) (see, e.g., Yan et al., Cas13d Is a Compact RNA-Targeting Type VI CRISPR Effector Positively Modulated by a WYL-Domain-Containing Accessory Protein, Molecular Cell (2018), doi.org/10.1016/j.molcel.2018.02.028). RspCas13d and EsCas13d have no flanking sequence requirements (e.g., PFS, PAM).

[0234] In certain other example embodiments, the masking construct may comprise an RNA oligonucleotide to which are attached a detectable label and a masking agent of that detectable label. An example of such a detectable label/masking agent pair is a fluorophore and a quencher of the fluorophore. Quenching of the fluorophore can occur as a result of the formation of a non-fluorescent complex between the fluorophore and another fluorophore or non-fluorescent molecule. This mechanism is known as ground-state complex formation, static quenching, or contact quenching. Accordingly, the RNA oligonucleotide may be designed so that the fluorophore and quencher are in sufficient proximity for contact quenching to occur. Fluorophores and their cognate quenchers are known in the art and can be selected for this purpose by one having ordinary skill in the art. The particular fluorophore/quencher pair is not critical in the context of this invention, only that selection of the fluorophore/quencher pairs ensures masking of the fluorophore. Upon activation of the effector proteins disclosed herein, the RNA oligonucleotide is cleaved thereby severing the proximity between the fluorophore and quencher needed to maintain the contact quenching effect. Accordingly, detection of the fluorophore may be used to determine the presence of a target molecule in a sample.

[0235] In certain other example embodiments, the masking construct may comprise one or more RNA oligonucleotides to which are attached one or more metal nanoparticles, such as gold nanoparticles. In some embodiments, the masking construct comprises a plurality of metal nanoparticles crosslinked by a plurality of RNA oligonucleotides forming a closed loop. In one embodiment, the masking construct comprises three gold nanoparticles crosslinked by three RNA oligonucleotides forming a closed loop. In some embodiments, the cleavage of the RNA oligonucleotides by the CRISPR effector protein leads to a detectable signal produced by the metal nanoparticles.

[0236] In certain other example embodiments, the masking construct may comprise one or more RNA oligonucleotides to which are attached one or more quantum dots. In some embodiments, the cleavage of the RNA oligonucleotides by the CRISPR effector ptrotein leads to a detectable signal produced by the quantum dots.

[0237] In one example embodiment, the masking construct may comprise a quantum dot. The quantum dot may have multiple linker molecules attached to the surface. At least a portion of the linker molecule comprises RNA. The linker molecule is attached to the quantum dot at one end and to one or more quenchers along the length or at terminal ends of the linker such that the quenchers are maintained in sufficient proximity for quenching of the quantum dot to occur. The linker may be branched. As above, the quantum dot/quencher pair is not critical, only that selection of the quantum dot/quencher pair ensures masking of the fluorophore. Quantum dots and their cognate quenchers are known in the art and can be selected for this purpose by one having ordinary skill in the art Upon activation of the effector proteins disclosed herein, the RNA portion of the linker molecule is cleaved thereby eliminating the proximity between the quantum dot and one or more quenchers needed to maintain the quenching effect. In certain example embodiments the quantum dot is streptavidin conjugated. RNA are attached via biotin linkers and recruit quenching molecules with the sequences /5Biosg/UCUCGUACGUUC/3IAbRQSp/ (SEQ ID NO: 416) or /5Biosg/UCUCGUACGUUCUCUCGUACGUUC/3IAbRQSp/ (SEQ ID NO: 417), where /5Biosg/ is a biotin tag and /31AbRQSp/ is an Iowa black quencher. Upon cleavage, by the activated effectors disclosed herein the quantum dot will fluoresce visibily.

[0238] In a similar fashion, fluorescence energy transfer (FRET) may be used to generate a detectable positive signal. FRET is a non-radiative process by which a photon from an energetically excited fluorophore (i.e. “donor fluorophore”) raises the energy state of an electron in another molecule (i.e. “the acceptor”) to higher vibrational levels of the excited singlet state. The donor fluorophore returns to the ground state without emitting a fluoresce characteristic of that fluorophore. The acceptor can be another fluorophore or non-fluorescent molecule. If the acceptor is a fluorophore, the transferred energy is emitted as fluorescence characteristic of that fluorophore. If the acceptor is a non-fluorescent molecule the absorbed energy is loss as heat. Thus, in the context of the embodiments disclosed herein, the fluorophore/quencher pair is replaced with a donor fluorophore/acceptor pair attached to the oligonucleotide molecule. When intact, the masking construct generates a first signal (negative detectable signal) as detected by the fluorescence or heat emitted from the acceptor. Upon activation of the effector proteins disclosed herein the RNA oligonucleotide is cleaved and FRET is disrupted such that fluorescence of the donor fluorophore is now detected (positive detectable signal).

[0239] In certain example embodiments, the masking construct comprises the use of intercalating dyes which change their absorbance in response to cleavage of long RNAs to short nucleotides. Several such dyes exist. For example, pyronine-Y will complex with RNA and form a complex that has an absorbance at 572 nm. Cleavage of the RNA results in loss of absorbance and a color change. Methylene blue may be used in a similar fashion, with changes in absorbance at 688 nm upon RNA cleavage. Accordingly, in certain example embodiments the masking construct comprises a RNA and intercalating dye complex that changes absorbance upon the cleavage of RNA by the effector proteins disclosed herein.

### Amplification

[0240] In certain example embodiments, target RNAs and/or DNAs may be amplified prior to activating the CRISPR effector protein. Any suitable RNA or DNA amplification technique may be used. In certain example embodiments, the RNA or DNA amplification is an isothermal amplification. In certain example embodiments, the isothermal amplification may be nucleic-acid sequenced-based amplification (NASBA), recombinase polymerase amplification (RPA), loop-mediated isothermal amplification (LAMP), strand displacement amplification (SDA), helicase-dependent amplification (HDA), or nicking enzyme amplification reaction (NEAR). In certain example embodiments, non-isothermal amplification methods may be used which include, but are not limited to, PCR, multiple displacement amplification (MDA), rolling circle amplification (RCA), ligase chain reaction (LCR), or ramification amplification method (RAM).

[0241] In certain example embodiments, the RNA or DNA amplification is nucleic acid sequence-based amplification is NASBA, which is initiated with reverse transcription of target RNA by a sequence-specific reverse primer to create a RNA/DNA duplex. RNase H is then used to degrade the RNA template, allowing a forward primer containing a promoter, such as the T7 promoter, to bind and initiate elongation of the complementary strand, generating a double-stranded DNA product. The RNA polymerase promoter-mediated transcription of the DNA template then creates copies of the target RNA sequence. Importantly, each of the new target RNAs can be detected by the guide RNAs thus further enhancing the sensitivity of the assay. Binding of the target RNAs by the guide RNAs then leads to activation of the CRISPR effector protein and the methods proceed as outlined above. The NASBA reaction has the additional advantage of being able to proceed under moderate isothermal conditions, for example at approximately 41° C., making it suitable for systems and devices deployed for early and direct detection in the field and far from clinical laboratories.

[0242] In certain other example embodiments, a recombinase polymerase amplification (RPA) reaction may be used to amplify the target nucleic acids. RPA reactions employ recombinases which are capable of pairing sequence-specific primers with homologous sequence in duplex DNA. If target DNA is present, DNA amplification is initiated and no other sample manipulation such as thermal cycling or chemical melting is required. The entire RPA amplification system is stable as a dried formulation and can be transported safely without refrigeration. RPA reactions may also be carried out at isothermal temperatures with an optimum reaction temperature of 37-42° C. The sequence specific primers are designed to amplify a sequence comprising the target nucleic acid sequence to be detected. In certain example embodiments, a RNA polymerase promoter, such as a T7 promoter, is added to one of the primers. This results in an amplified double-stranded DNA product comprising the target sequence and a RNA polymerase promoter. After, or during, the RPA reaction, a RNA polymerase is added that will produce RNA from the double-stranded DNA templates. The amplified target RNA can then in turn be detected by the CRISPR effector system. In this way target DNA can be detected using the embodiments disclosed herein. RPA reactions can also be used to amplify target RNA. The target RNA is first converted to cDNA using a reverse transcriptase, followed by second strand DNA synthesis, at which point the RPA reaction proceeds as outlined above.

[0243] Accordingly, in certain example embodiments the systems disclosed herein may include amplification reagents. Different components or reagents useful for amplification of nucleic acids are described herein. For example, an amplification reagent as described herein may include a buffer, such as a Tris buffer. A Tris buffer may be used at any concentration appropriate for the desired application or use, for example including, but not limited to, a concentration of 1 mM, 2 mM, 3 mM, 4 mM, 5 mM, 6 mM, 7 mM, 8 mM, 9 mM, 10 mM, 11 mM, 12 mM, 13 mM, 14 mM, 15 mM, 25 mM, 50 mM, 75 mM, 1 M, or the like. One of skill in the art will be able to determine an appropriate concentration of a buffer such as Tris for use with the present invention.

[0244] A salt, such as magnesium chloride (MgCl₂), potassium chloride (KCl), or sodium chloride (NaCl), may be included in an amplification reaction, such as PCR, in order to improve the amplification of nucleic acid fragments. Although the salt concentration will depend on the particular reaction and application, in some embodiments, nucleic acid fragments of a particular size may produce optimum results at particular salt concentrations. Larger products may require altered salt concentrations, typically lower salt, in order to produce desired results, while amplification of smaller products may produce better results at higher salt concentrations. One of skill in the art will understand that the presence and/or concentration of a salt, along with alteration of salt concentrations, may alter the stringency of a biological or chemical reaction, and therefore any salt may be used that provides the appropriate conditions for a reaction of the present invention and as described herein.

[0245] Other components of a biological or chemical reaction may include a cell lysis component in order to break open or lyse a cell for analysis of the materials therein. A cell lysis component may include, but is not limited to, a detergent, a salt as described above, such as NaCl, KCl, ammonium sulfate [(NH₄)₂SO₄], or others. Detergents that may be appropriate for the invention may include Triton X-100, sodium dodecyl sulfate (SDS), CHAPS (3-[(3-cholamidopropyl)dimethylammonio]-1-propanesulfonate), ethyl trimethyl ammonium bromide, nonyl phenoxypolyethoxylethanol (NP-40). Concentrations of detergents may depend on the particular application, and may be specific to the reaction in some cases. Amplification reactions may include dNTPs and nucleic acid primers used at any concentration appropriate for the invention, such as including, but not limited to, a concentration of 100 nM, 150 nM, 200 nM, 250 nM, 300 nM, 350 nM, 400 nM, 450 nM, 500 nM, 550 nM, 600 nM, 650 nM, 700 nM, 750 nM, 800 nM, 850 nM, 900 nM, 950 nM, 1 mM, 2 mM, 3 mM, 4 mM, 5 mM, 6 mM, 7 mM, 8 mM, 9 mM, 10 mM, 20 mM, 30 mM, 40 mM, 50 mM, 60 mM, 70 mM, 80 mM, 90 mM, 100 mM, 150 mM, 200 mM, 250 mM, 300 mM, 350 mM, 400 mM, 450 mM, 500 mM, or the like. Likewise, a polymerase useful in accordance with the invention may be any specific or general polymerase known in the art and useful or the invention, including Taq polymerase, Q5 polymerase, or the like.

[0246] In some embodiments, amplification reagents as described herein may be appropriate for use in hot-start amplification. Hot start amplification may be beneficial in some embodiments to reduce or eliminate dimerization of adaptor molecules or oligos, or to otherwise prevent unwanted amplification products or artifacts and obtain optimum amplification of the desired product. Many components described herein for use in amplification may also be used in hot-start amplification. In some embodiments, reagents or components appropriate for use with hot-start amplification may be used in place of one or more of the composition components as appropriate. For example, a polymerase or other reagent may be used that exhibits a desired activity at a particular temperature or other reaction condition. In some embodiments, reagents may be used that are designed or optimized for use in hot-start amplification, for example, a polymerase may be activated after transposition or after reaching a particular temperature. Such polymerases may be antibody-based or apatamer-based. Polymerases as described herein are known in the art. Examples of such reagents may include, but are not limited to, hot-start polymerases, hot-start dNTPs, and photo-caged dNTPs. Such reagents are known and available in the art. One of skill in the art will be able to determine the optimum temperatures as appropriate for individual reagents.

[0247] Amplification of nucleic acids may be performed using specific thermal cycle machinery or equipment, and may be performed in single reactions or in bulk, such that any desired number of reactions may be performed simultaneously. In some embodiments, amplification may be performed using microfluidic or robotic devices, or may be performed using manual alteration in temperatures to achieve the desired amplification. In some embodiments, optimization may be performed to obtain the optimum reactions conditions for the particular application or materials. One of skill in the art will understand and be able to optimize reaction conditions to obtain sufficient amplification.

[0248] In certain embodiments, detection of DNA with the methods or systems of the invention requires transcription of the (amplified) DNA into RNA prior to detection.

### Target RNA/DNA Enrichment

[0249] In certain example embodiments, target RNA or DNA may first be enriched prior to detection or amplification of the target RNA or DNA. In certain example embodiments, this enrichment may be achieved by binding of the target nucleic acids by a CRISPR effector system.

[0250] Current target-specific enrichment protocols require single-stranded nucleic acid prior to hybridization with probes. Among various advantages, the present embodiments can skip this step and enable direct targeting to double-stranded DNA (either partly or completely double-stranded). In addition, the embodiments disclosed herein are enzyme-driven targeting methods that offer faster kinetics and easier workflow allowing for isothermal enrichcment. In certain example embodiments enrichment may take place between 20-37° C. In certain example embodiments, a set of guide RNAs to different target nucleic acids are used in a single assay, allowing for detection of multiple targets an/or multiple variants of a single target.

[0251] In certain example embodiments, the dead CRISPR effector protein may bind the target nucleic acid in solution and then subsequently be isolated from said solution. For example, the dead CRISPR effector protein bound to the target nucleic acid, may be isolated from the solution using an antibody or other molecule, such as an aptamer, that specifically binds the dead CRISPR effector protein.

[0252] In other example embodiments, the dead CRISPR effector protein may bound to a solid substrate. A fixed substratum may refer to any material that is appropriate for or can be modified to be appropriate for the attachment of a polypeptide or a polynucleotide. Possible substrates include, but are not limited to, glass and modified functionalized glass, plastics (including acrylics, polystyrene and copolymers of styrene and other materials, polypropylene, polyethylene, polybutylene, polyurethanes, Teflon™, etc.), polysaccharides, nylon or nitrocellulose, ceramics, resins, silica or silica-based materials including silicon and modified silicon, carbon, metals, inorganic glasses, plastics, optical fiber bundes, and a variety of other polymers. In some embodiments, the solid support comprises a patterened surface suitable for immobilization of molecules in an ordered pattern. In certain embodiments a patterned surface refers to an arrangement of different regions in or on an exposed layer of a solid support. In some embodiments, the solid support comprises an array of wells or depressions in a surface. The composition and geometry of the solid support can vary with its use. In some embodiments, the solids support is a planar structure such as a slide, chip, microchip and/or array. As such, the surface of the substrate can be in the form of a planar layer. In some embodiments, the solid support comprises one or more surfaces of a flowcell. The term “flowcell” as used herein refers to a chamber comprising a solid surface across which one or more fluid reagent can be flowed. Example flowcells and related fluidic systems and detection platforms that can be readily used in the methods of the present disclosure are described, for example, in Bentley et al. Nature 456:53-59 (2008), WO 04/0918497, U.S. Pat. No. 7,057,026; WO 91/06678; WO 07/123744; U.S. Pat. Nos. 7,329,492; 7,211,414; 7,315,019; 7,405,281, and US 2008/0108082. In some embodiments, the solid support or its surface is non-planar, such as the inner or outer surface of a tube or vessel. In some embodiments, the solid support comprise microspheres or beads. “Microspheres,” “bead,” “particles,” are intended to mean within the context of a solid substrate to mean small discrete particles made of various material including, but not limited to, plastics, ceramics, glass, and plystyrene. In certain embodiments, the microspheres are magnetic microsphers or eads. Alternatively or additionally, the beads may be porous. The bead sizes range from nanometers, e.g. 100 nm, to millimeters, e.g. 1 mm.

[0253] A sample containing, or suspected of containing, the target nucleic acids may then be exposed to the substrate to allow binding of the target nucleic acids to the bound dead CRISPR effector protein. Non-target molecules may then be washed away. In certain example embodiments, the target nucleic acids may then be released from the CRISPR effector protein/guide RNA complex for further detection using the methods disclosed herein. In certain example embodiments, the target nucleic acids may first be amplified as described herein.

[0254] In certain example embodiments, the CRISPR effector may be labeled with a binding tag. In certain example embodiments the CRISPR effector may be chemically tagged. For example, the CRISPR effector may be chemically biotinylated. In another example embodiment, a fusion may be created by adding additional sequence encoding a fusion to the CRISPR effector. One example of such a fusion is an AviTag™, which employs a highly targeted enzymatic conjugation of a single biotin on a unique 15 amino acide peptide tag. In certain embodiments, the CRISPR effector may be labeled with a capture tag such as, but not limited to, GST, Myc, hemagglutinin (HA), green fluorescent protein (GFP), flag, His tag, TAP tag, and Fc tag. The binding tag, whether a fusion, chemical tag, or capture tag, may be used to either pull down the CRISPR effector system once it has bound a target nucleic acid or to fix the CRISPR effector system on the solid substrate.

[0255] In certain example embodiments, the guide RNA may be labeled with a binding tag. In certain example embodiments, the entire guide RNA may be labeled using in vitro transcription (IVT) incorporating one or more biotinylated nucleotides, such as, biotinylated uracil. In some embodiments, biotin can be chemically or enzymatically added to the guide RNA, such as, the addition of one or more biotin groups to the 3′ end of the guide RNA. The binding tag may be used to pull down the guide RNA/target nucleic acid complex after binding has occurred, for example, by exposing the guide RNA/target nucleic acid to a streptavidin coated solid substrate.

[0256] Accordingly, in certain example embodiments, an engineered or non-naturally-occurring CRISPR effector may be used for enrichment purposes. In an embodiment, the modification may comprise mutation of one or more amino acid residues of the effector protein. The one or more mutations may be in one or more catalytically active domains of the effector protein. The effector protein may have reduced or abolished nuclease activity compared with an effector protein lacking said one or more mutations. The effector protein may not direct cleavage of the RNA strand at the target locus of interest. In a preferred embodiment, the one or more mutations may comprise two mutations. In a preferred embodiment the one or more amino acid residues are modified in a C2c2 effector protein, e.g., an engineered or non-naturally-occurring effector protein or C2c2. In particular embodiments, the one or more modified of mutated amino acid residues are one or more of those in C2c2 corresponding to R597, H602, R1278 and H1283 (referenced to Lsh C2c2 amino acids), such as mutations R597A, H602A, R1278A and H1283A, or the corresponding amino acid residues in Lsh C2c2 orthologues.

[0257] In particular embodiments, the one or more modified of mutated amino acid residues are one or more of those in C2c2 corresponding to K2, K39, V40, E479, L514, V518, N524, G534, K535, E580, L597, V602, D630, F676, L709, I713, R717 (HEPN), N718, H722 (HEPN), E773, P823, V828, I879, Y880, F884, Y997, L1001, F1009, L1013, Y1093, L1099, L1111, Y1114, L1203, D1222, Y1244, L1250, L1253, K1261, I1334, L1355, L1359, R1362, Y1366, E1371, R1372, D1373, R1509 (HEPN), H1514 (HEPN), Y1543, D1544, K1546, K1548, V1551, I1558, according to C2c2 consensus numbering. In certain embodiments, the one or more modified of mutated amino acid residues are one or more of those in C2c2 corresponding to R717 and R1509. In certain embodiments, the one or more modified of mutated amino acid residues are one or more of those in C2c2 corresponding to K2, K39, K535, K1261, R1362, R1372, K1546 and K1548. In certain embodiments, said mutations result in a protein having an altered or modified activity. In certain embodiments, said mutations result in a protein having a reduced activity, such as reduced specificity. In certain embodiments, said mutations result in a protein having no catalytic activity (i.e. “dead” C2c2). In an embodiment, said amino acid residues correspond to Lsh C2c2 amino acid residues, or the corresponding amino acid residues of a C2c2 protein from a different species. Devices that can faciliatate these steps.

[0258] The above enrichment systems may also be used to depelete a sample of certain nucleic acids. For example, guide RNAs may be designed to bind non-target RNAs to remove the non-target RNAs from the sample. In one example embodiment, the guide RNAs may be designed to bind nucleic acids that do carry a particular nucleic acid variation. For example, in a given sample a higher copy number of non-variant nucleic acids may be expected. Accordingly, the embodiments disclosed herein may be used to remove the non-variant nucleic acids from a sample, to increase the efficiency with which the detection CRISPR effector system can detect the target variant sequences in a given sample.

### Detection of Proteins

[0259] The systems, devices, and methods disclosed herein may be adapted for detection of polypeptides (or other molecules) in addition to detection of nucleic acids, via incorporation of a specifically configured polypeptide detection aptamer. The polypeptide detection aptamers are distinct from the masking construct aptamers discussed above. First, the aptamers are designed to specifically bind to one or more target molecules. In one example embodiment, the target molecule is a target polypeptide. In another example embodiment, the target molecule is a target chemical compounds, such as a target therapeutic molecule. Methods for designing and selecting aptamers with specificity for a given target, such as SELEX, are known in the art. In addition to specificity to a given target the aptamers are further designed to incorporate a RNA polymerase promoter binding site. In certain example embodiments, the RNA polymerase promoter is a T7 promoter. Prior to binding to a target the RNA polymerase site is not accessible or otherwise recognizable to a RNA polymerase. However, the aptamer is configured so that upon binding of a target the structure of the aptamer undergoes a conformational change such that the RNA polymerase promoter is exposed. An aptamer sequence downstream of the RNA polymerase promoter acts as a template for generation of a trigger RNA oligonucleotide by a RNA polymerase. Thus, the template portion of the aptamer may further incorporate a barcode or other identifying sequence that identifies a given aptamer and its target. Guide RNAs as described above may then be designed to recognize these specific trigger oligonucleotide sequences. Binding of the guide RNAs to the trigger oligonucleotides activates the CRISPR effector proteins which proceeds to deactivate the masking constructs and generate a positive detectable signal as described previously.

[0260] Accordingly, in certain example embodiments, the methods disclosed herein comprise the additional step of distributing a sample or set of sample into a set of individual discrete volumes, each individual discrete volume comprising peptide detection aptamers, a CRISPR effector protein, one or more guide RNAs, a masking construct, and incubating the sample or set of samples under conditions sufficient to allow binding of the peptide detection aptamers to the one or more target molecules, wherein binding of the aptamer to a corresponding target exposed the RNA polymerase promoter binding site resulting in synthesis of a trigger RNA via binding of a RNA polymerase to the RNA polymerase promoter binding site.

[0261] In another example embodiment, binding of the aptamer may expose a primer binding site upon binding of the aptamer to a target polypeptide. For example, the aptamer may expose a RPA primer binding site. Thus, the addition or inclusion of the primer will then feed into an amplification reaction, such as the RPA reaction as outlined above.

[0262] In certain example embodiments, the aptamer may be a conformation-switching aptamer, which upon binding to the target of interest may change secondary structure and expose new regions of single-stranded DNA. In certain example embodiments, these new-regions of single-stranded DNA may be used as substrates for ligation, extending the aptamers and creating longer ssDNA molecules which can be specifically detected using the embodiments disclosed herein. The aptamer design could be further combined with ternary complexes for detection of low-epitope targets, such as glucose (Yang et al. 2015: http://pubs.acs.org/doi/abs/10.1021/acs.analchem.5b01634). Example conformation shifting aptamers and corresponding guide RNAs (crRNAs) are shown in Table 7 below.

TABLE 7

| | |
|---|---|
| Thrombin aptamer | (SEQ. I D. No. 186) |
| Thrombin ligation probe | (SEQ. I D. No. 187) |
| Thrombin RPA forward 1 primer | (SEQ. I D. No. 188) |
| Thrombin RPA forward 2 primer | (SEQ. I D. No. 189) |
| Thrombin RPA reverse 1 primer | (SEQ. I.D. No. 190) |
| Thrombin crRNA 1 | (SEQ. I D. No. 191) |
| Thrombin crRNA 2 | (SEQ. I.D. No. 192) |
| Thrombin crRNA 3 | (SEQ. I.D. No. 193) |
| PTK7 full length amplicon control | (SEQ. I.D. No. 194) |
| PTK7 aptamer | (SEQ. I D. No. 195) |
| PTK7 ligation probe | (SEQ. I.D. No. 196) |
| PTK7 RPA forward 1 primer | (SEQ. I.D. No. 197) |
| PTK7 RPA reverse 1 primer | (SEQ. I D. No. 198) |
| PTK7 crRNA 1 | (SEQ. I.D. No. 199) |
| PTK7 crRNA 2 | (SEQ. I.D. No. 200) |
| PTK7 crRNA 3 | (SEQ. I.D. No. 201) |

### Devices

[0263] The systems described herein can be embodied on diagnostic devices. A number of substrates and configurations of devices capable of defining multiple individual discrete volumes within the device may be used. As used herein “individual discrete volume” refers to a discrete space, such as a container, receptacle, or other arbitrary defined volume or space that can be defined by properties that prevent and/or inhibit migration of target molecules, for example a volume or space defined by physical properties such as walls, for example the walls of a well, tube, or a surface of a droplet, which may be impermeable or semipermeable, or as defined by other means such as chemical, diffusion rate limited, electro-magnetic, or light illumination, or any combination thereof that can contain a target molecule and a indexable nucleic acid identifier (for example nucleic acid barcode). By “diffusion rate limited” (for example diffusion defined volumes) is meant spaces that are only accessible to certain molecules or reactions because diffusion constraints effectively defining a space or volume as would be the case for two parallel laminar streams where diffusion will limit the migration of a target molecule from one stream to the other. By “chemical” defined volume or space is meant spaces where only certain target molecules can exist because of their chemical or molecular properties, such as size, where for example gel beads may exclude certain species from entering the beads but not others, such as by surface charge, matrix size or other physical property of the bead that can allow selection of species that may enter the interior of the bead. By “electro-magnetically” defined volume or space is meant spaces where the electro-magnetic properties of the target molecules or their supports such as charge or magnetic properties can be used to define certain regions in a space such as capturing magnetic particles within a magnetic field or directly on magnets. By “optically” defined volume is meant any region of space that may be defined by illuminating it with visible, ultraviolet, infrared, or other wavelengths of light such that only target molecules within the defined space or volume may be labeled. One advantage to the use of non-walled, or semipermeable discrete volumes is that some reagents, such as buffers, chemical activators, or other agents may be passed through the discrete volume, while other materials, such as target molecules, may be maintained in the discrete volume or space. Typically, a discrete volume will include a fluid medium, (for example, an aqueous solution, an oil, a buffer, and/or a media capable of supporting cell growth) suitable for labeling of the target molecule with the indexable nucleic acid identifier under conditions that permit labeling. Exemplary discrete volumes or spaces useful in the disclosed methods include droplets (for example, microfluidic droplets and/or emulsion droplets), hydrogel beads or other polymer structures (for example poly-ethylene glycol di-acrylate beads or agarose beads), tissue slides (for example, fixed formalin paraffin embedded tissue slides with particular regions, volumes, or spaces defined by chemical, optical, or physical means), microscope slides with regions defined by depositing reagents in ordered arrays or random patterns, tubes (such as, centrifuge tubes, microcentrifuge tubes, test tubes, cuvettes, conical tubes, and the like), bottles (such as glass bottles, plastic bottles, ceramic bottles, Erlenmeyer flasks, scintillation vials and the like), wells (such as wells in a plate), plates, pipettes, or pipette tips among others. In certain embodiments, the compartment is an aqueous droplet in a water-in-oil emulsion. In specific embodiments, any of the applications, methods, or systems described herein requiring exact or uniform volumes may employ the use of an acoustic liquid dispenser.

[0264] In certain example embodiments, the device comprises a flexible material substrate on which a number of spots may be defined. Flexible substrate materials suitable for use in diagnostics and biosensing are known within the art. The flexible substrate materials may be made of plant derived fibers, such as cellulosic fibers, or may be made from flexible polymers such as flexible polyester films and other polymer types. Within each defined spot, reagents of the system described herein are applied to the individual spots. Each spot may contain the same reagents except for a different guide RNA or set of guide RNAs, or where applicable, a different detection aptamer to screen for multiple targets at once. Thus, the systems and devices herein may be able to screen samples from multiple sources (e.g. multiple clinical samples from different individuals) for the presence of the same target, or a limited number of target, or aliquots of a single sample (or multiple samples from the same source) for the presence of multiple different targets in the sample. In certain example embodiments, the elements of the systems described herein are freeze dried onto the paper or cloth substrate. Example flexible material based substrates that may be used in certain example devices are disclosed in Pardee et al. Cell. 2016, 165(5):1255-66 and Pardee et al. Cell. 2014, 159(4):950-54. Suitable flexible material-based substrates for use with biological fluids, including blood are disclosed in International Patent Application Publication No. WO/2013/071301 entitled “Paper based diagnostic test” to Shevkoplyas et al. U.S. Patent Application Publication No. 2011/0111517 entitled “Paper-based microfluidic systems” to Siegel et al. and Shafiee et al. “Paper and Flexible Substrates as Materials for Biosensing Platforms to Detect Multiple Biotargets” Scientific Reports 5:8719 (2015). Further flexible based materials, including those suitable for use in wearable diagnostic devices are disclosed in Wang et al. “Flexible Substrate-Based Devices for Point-of-Care Diagnostics” Cell 34(11):909-21 (2016). Further flexible based materials may include nitrocellulose, polycarbonate, methylethyl cellulose, polyvinylidene fluoride (PVDF), polystyrene, or glass (see e.g., US20120238008). In certain embodiments, discrete volumes are separated by a hydrophobic surface, such as but not limited to wax, photoresist, or solid ink.

[0265] In some embodiments, a dosimeter or badge may be provided that serves as a sensor or indicator such that the wearer is notified of exposure to certain microbes or other agents. For example, the systems described herein may be used to detect a particular pathogen. Likewise, aptamer based embodiments disclosed above may be used to detect both polypeptide as well as other agents, such as chemical agents, to which a specific aptamer may bind. Such a device may be useful for surveillance of soldiers or other military personnel, as well as clinicians, researchers, hospital staff, and the like, in order to provide information relating to exposure to potentially dangerous microbes as quickly as possible, for example for biological or chemical warfare agent detection. In other embodiments, such a surveillance badge may be used for preventing exposure to dangerous microbes or pathogens in immunocompromised patients, burn patients, patients undergoing chemotherapy, children, or elderly individuals.

[0266] Samples sources that may be analyzed using the systems and devices described herein include biological samples of a subject or environmental samples. Environmental samples may include surfaces or fluids. The biological samples may include, but are not limited to, saliva, blood, plasma, sera, stool, urine, sputum, mucous, lymph, synovial fluid, spinal fluid, cerebrospinal fluid, a swab from skin or a mucosal membrane, or combination thereof. In an example embodiment, the environmental sample is taken from a solid surface, such as a surface used in the preparation of food or other sensitive compositions and materials.

[0267] In other example embodiments, the elements of the systems described herein may be place on a single use substrate, such as swab or cloth that is used to swab a surface or sample fluid. For example, the system could be used to test for the presence of a pathogen on a food by swabbing the surface of a food product, such as a fruit or vegetable. Similarly, the single use substrate may be used to swab other surfaces for detection of certain microbes or agents, such as for use in security screening. Single use substrates may also have applications in forensics, where the CRISPR systems are designed to detect, for example identifying DNA SNPs that may be used to identify a suspect, or certain tissue or cell markers to determine the type of biological matter present in a sample. Likewise, the single use substrate could be used to collect a sample from a patient—such as a saliva sample from the mouth—or a swab of the skin. In other embodiments, a sample or swab may be taken of a meat product on order to detect the presence of absence of contaminants on or within the meat product.

[0268] Near-real-time microbial diagnostics are needed for food, clinical, industrial, and other environmental settings (see e.g., Lu T K, Bowers J, and Koeris M S., Trends Biotechnol. 2013 June; 31(6):325-7). In certain embodiments, the present invention is used for rapid detection of foodborne pathogens using guide RNAs specific to a pathogen (e.g., Campylobacter jejuni, Clostridium perfringens, Salmonella spp., Escherichia coli, Bacillus cereus, Listeria monocytogenes, Shigella spp., Staphylococcus aureus, Staphylococcal enteritis, Streptococcus, Vibrio cholerae, Vibrio parahaemolyticus, Vibrio vulnificus, Yersinia enterocolitica and Yersinia pseudotuberculosis, Brucella spp., Corynebacterium ulcerans, Coxiella burnetii, or Plesiomonas shigelloides).

[0269] In certain embodiments, the device is or comprises a flow strip. For instance, a lateral flow strip allows for RNAse (e.g. C2c2) detection by color. The RNA reporter is modified to have a first molecule (such as for instance FITC) attached to the 5′ end and a second molecule (such as for instance biotin) attached to the 3′ end (or vice versa). The lateral flow strip is designed to have two capture lines with anti-first molecule (e.g. anti-FITC) antibodies hybridized at the first line and anti-second molecule (e.g. anti-biotin) antibodies at the second downstream line. As the SHERLOCK reaction flows down the strip, uncleaved reporter will bind to anti-first molecule antibodies at the first capture line, while cleaved reporters will liberate the second molecule and allow second molecule binding at the second capture line. Second molecule sandwich antibodies, for instance conjugated to nanoparticles, such as gold nanoparticles, will bind any second molecule at the first or second line and result in a strong readout/signal (e.g. color). As more reporter is cleaved, more signal will accumulate at the second capture line and less signal will appear at the first line. In certain aspects, the invention relates to the use of a follow strip as described herein for detecting nucleic acids or polypeptides. In certain aspects, the invention relates to a method for detecting nucleic acids or polypeptides with a flow strip as defined herein, e.g. (lateral) flow tests or (lateral) flow immunochromatographic assays.

[0270] In certain example embodiments, the device is a microfluidic device that generates and/or merges different droplets (i.e. individual discrete volumes). For example, a first set of droplets may be formed containing samples to be screened and a second set of droplets formed containing the elements of the systems described herein. The first and second set of droplets are then merged and then diagnostic methods as described herein are carried out on the merged droplet set. Microfluidic devices disclosed herein may be silicone-based chips and may be fabricated using a variety of techniques, including, but not limited to, hot embossing, molding of elastomers, injection molding, LIGA, soft lithography, silicon fabrication and related thin film processing techniques. Suitable materials for fabricating the microfluidic devices include, but are not limited to, cyclic olefin copolymer (COC), polycarbonate, poly(dimethylsiloxane) (PDMS), and poly(methylacrylate) (PMMA). In one embodiment, soft lithography in PDMS may be used to prepare the microfluidic devices. For example, a mold may be made using photolithogrophy which defines the location of flow channels, valves, and filters within a substrate. The substrate material is poured into a mold and allowed to set to create a stamp. The stamp is then sealed to a solid support, such as but not limited to, glass. Due to the hydrophobic nature of some polymers, such as PDMS, which absorbs some proteins and may inhibit certain biological processes, a passivating agent may be necessary (Schoffner et al. Nucleic Acids Research, 1996, 24:375-379). Suitable passivating agents are known in the art and include, but are not limited to, silanes, parylene, n-Dodecyl-b-D-matoside (DDM), pluronic, Tween-20, other similar surfactants, polyethylene glycol (PEG), albumin, collagen, and other similar proteins and peptides.

[0271] In certain example embodiments, the system and/or device may be adapted for conversion to a flow-cytometry readout in or allow to all of sensistive and quantitative measurements of millions of cells in a single experiment and improve upon existing flow-based methods, such as the PrimeFlow assay. In certain example embodimemnts, cells may be cast in droplets containing unpolymerized gel monomer, which can then be cast into single-cell droplets suitable for analysis by flow cytometry. A detection construct comprising a fluorescent detectable label may be cast into the droplet comprising unpolymerized gel monomer. Upon polymerization of the gel monomer to form a bead within a droplet. Because gel polymerization is through free-radical formation, the fluorescent reporter becomes covalently bound to the gel. The detection construct may be further modified to comprise a linker, such as an amine. A quencher may be added post-gel formation and will bind via the linker to the reporter construct. Thus, the quencher is not bound to the gel and is free to diffuse away when the reporter is cleaved by the CRISPR effector protein. Amplification of signal in droplet may be achieved by coupling the detection construct oa hybridization chain reaction (HCR initiatiors) amplification. DNA/RNA hybrid hairpins may be incorporated into the gel which may comprise a hairpin loop that has a RNase sensitive domain. By protecting a strand displacement toehold within a hairpin loop that has a RNase sensitive domain, HCR initiators may be selectively deprotected following cleavage of the hairpin loop by the CRISPR effector protin. Following deprotection of HCR initiators via toehold mediated strand displacement, fluorescent HCR monomers may be washed into the gel to enable signal amplification where the iniators are deprotected.

[0272] An example of microfluidic device that may be used in the context of the invention is described in Hou et al. “Direct Dectection and drug-resistance profiling ofbacteremias using inertial microfluidics” Lap Chip. 15(10):2297-2307 (2016).

[0273] In systems described herein, may further be incorporated into wearable medical devices that assess biological samples, such as biological fluids, of a subject outside the clinic setting and report the outcome of the assay remotely to a central server accessible by a medical care professional. The device may include the ability to self-sample blood, such as the devices disclosed in U.S. Patent Application Publication No. 2015/0342509 entitled “Needle-free Blood Draw to Peeters et al., U.S. Patent Application Publication No. 2015/0065821 entitled “Nanoparticle Phoresis” to Andrew Conrad.

[0274] In certain example embodiments, the device may comprise individual wells, such as microplate wells. The size of the microplate wells may be the size of standard 6, 24, 96, 384, 1536, 3456, or 9600 sized wells. In certain example embodiments, the elements of the systems described herein may be freeze dried and applied to the surface of the well prior to distribution and use.

[0275] The devices disclosed herein may further comprise inlet and outlet ports, or openings, which in turn may be connected to valves, tubes, channels, chambers, and syringes and/or pumps for the introduction and extraction of fluids into and from the device. The devices may be connected to fluid flow actuators that allow directional movement of fluids within the microfluidic device. Example actuators include, but are not limited to, syringe pumps, mechanically actuated recirculating pumps, electroosmotic pumps, bulbs, bellows, diaphragms, or bubbles intended to force movement of fluids. In certain example embodiments, the devices are connected to controllers with programmable valves that work together to move fluids through the device. In certain example embodiments, the devices are connected to the controllers discussed in further detail below. The devices may be connected to flow actuators, controllers, and sample loading devices by tubing that terminates in metal pins for insertion into inlet ports on the device.

[0276] As shown herein the elements of the system are stable when freeze dried, therefore embodiments that do not require a supporting device are also contemplated, i.e. the system may be applied to any surface or fluid that will support the reactions disclosed herein and allow for detection of a positive detectable signal from that surface or solution. In addition to freeze-drying, the systems may also be stably stored and utilized in a pelletized form. Polymers useful in forming suitable pelletized forms are known in the art.

[0277] In certain embodiments, the CRISPR effector protein is bound to each discrete volume in the device. Each discrete volume may comprise a different guide RNA specific for a different target molecule. In certain embodiments, a sample is exposed to a solid substrate comprising more than one discrete volume each comprising a guide RNA specific for a target molecule. Not being bound by a theory, each guide RNA will capture its target molecule from the sample and the sample does not need to be divided into separate assays. Thus, a valuable sample may be preserved. The effector protein may be a fusion protein comprising an affinity tag. Affinity tags are well known in the art (e.g., HA tag, Myc tag, Flag tag, His tag, biotin). The effector protein may be linked to a biotin molecule and the discrete volumes may comprise streptavidin. In other embodiments, the CRISPR effector protein is bound by an antibody specific for the effector protein. Methods of binding a CRISPR enzyme has been described previously (see, e.g., US20140356867A1).

[0278] The devices disclosed herein may also include elements of point of care (POC) devices known in the art for analyzing samples by other methods. See, for example St John and Price, “Existing and Emerging Technologies for Point-of-Care Testing” (Clin Biochem Rev. 2014 August; 35(3): 155-167).

[0279] The present invention may be used with a wireless lab-on-chip (LOC) diagnostic sensor system (see e.g., U.S. Pat. No. 9,470,699 “Diagnostic radio frequency identification sensors and applications thereof”). In certain embodiments, the present invention is performed in a LOC controlled by a wireless device (e.g., a cell phone, a personal digital assistant (PDA), a tablet) and results are reported to said device.

[0280] Radio frequency identification (RFID) tag systems include an RFID tag that transmits data for reception by an RFID reader (also referred to as an interrogater). In a typical RFID system, individual objects (e.g., store merchandise) are equipped with a relatively small tag that contains a transponder. The transponder has a memory chip that is given a unique electronic product code. The RFID reader emits a signal activating the transponder within the tag through the use of a communication protocol. Accordingly, the RFID reader is capable of reading and writing data to the tag. Additionally, the RFID tag reader processes the data according to the RFID tag system application. Currently, there are passive and active type RFID tags. The passive type RFID tag does not contain an internal power source, but is powered by radio frequency signals received from the RFID reader. Alternatively, the active type RFID tag contains an internal power source that enables the active type RFID tag to possess greater transmission ranges and memory capacity. The use of a passive versus an active tag is dependent upon the particular application.

[0281] Lab-on-the chip technology is well described in the scientific literature and consists of multiple microfluidic channels, input or chemical wells. Reactions in wells can be measured using radio frequency identification (RFID) tag technology since conductive leads from RFID electronic chip can be linked directly to each of the test wells. An antenna can be printed or mounted in another layer of the electronic chip or directly on the back of the device. Furthermore, the leads, the antenna and the electronic chip can be embedded into the LOC chip, thereby preventing shorting of the electrodes or electronics. Since LOC allows complex sample separation and analyses, this technology allows LOC tests to be done independently of a complex or expensive reader. Rather a simple wireless device such as a cell phone or a PDA can be used. In one embodiment, the wireless device also controls the separation and control of the microfluidics channels for more complex LOC analyses. In one embodiment, a LED and other electronic measuring or sensing devices are included in the LOC-RFID chip. Not being bound by a theory, this technology is disposable and allows complex tests that require separation and mixing to be performed outside of a laboratory.

[0282] In preferred embodiments, the LOC may be a microfluidic device. The LOC may be a passive chip, wherein the chip is powered and controlled through a wireless device. In certain embodiments, the LOC includes a microfluidic channel for holding reagents and a channel for introducing a sample. In certain embodiments, a signal from the wireless device delivers power to the LOC and activates mixing of the sample and assay reagents. Specifically, in the case of the present invention, the system may include a masking agent, CRISPR effector protein, and guide RNAs specific for a target molecule. Upon activation of the LOC, the microfluidic device may mix the sample and assay reagents. Upon mixing, a sensor detects a signal and transmits the results to the wireless device. In certain embodiments, the unmasking agent is a conductive RNA molecule. The conductive RNA molecule may be attached to the conductive material. Conductive molecules can be conductive nanoparticles, conductive proteins, metal particles that are attached to the protein or latex or other beads that are conductive. In certain embodiments, if DNA or RNA is used then the conductive molecules can be attached directly to the matching DNA or RNA strands. The release of the conductive molecules may be detected across a sensor. The assay may be a one step process.

[0283] Since the electrical conductivity of the surface area can be measured precisely quantitative results are possible on the disposable wireless RFID electro-assays. Furthermore, the test area can be very small allowing for more tests to be done in a given area and therefore resulting in cost savings. In certain embodiments, separate sensors each associated with a different CRISPR effector protein and guide RNA immobilized to a sensor are used to detect multiple target molecules. Not being bound by a theory, activation of different sensors may be distinguished by the wireless device.

[0284] In addition to the conductive methods described herein, other methods may be used that rely on RFID or Bluetooth as the basic low cost communication and power platform for a disposable RFID assay. For example, optical means may be used to assess the presence and level of a given target molecule. In certain embodiments, an optical sensor detects unmasking of a fluorescent masking agent.

[0285] In certain embodiments, the device of the present invention may include handheld portable devices for diagnostic reading of an assay (see e.g., Vashist et al., Commercial Smartphone-Based Devices and Smart Applications for Personalized Healthcare Monitoring and Management, Diagnostics 2014, 4(3), 104-128; mReader from Mobile Assay; and Holomic Rapid Diagnostic Test Reader).

[0286] As noted herein, certain embodiments allow detection via colorimetric change which has certain attendant benefits when embodiments are utilized in POC situations and or in resource poor environments where access to more complex detection equipment to readout the signal may be limited. However, portable embodiments disclosed herein may also be coupled with hand-held spectrophotometers that enable detection of signals outside the visible range. An example of a hand-held spectrophotometer device that may be used in combination with the present invention is described in Das et al. “Ultra-portable, wireless smartphone spectrophotometer for rapid, non-destructive testing of fruit ripeness.” Nature Scientific Reports. 2016, 6:32504, DOI: 10.1038/srep32504. Finally, in certain embodiments utilizing quantum dot-based masking constructs, use of a hand held UV light, or other suitable device, may be successfully used to detect a signal owing to the near complete quantum yield provided by quantum dots.

### Example Methods and Assays

[0287] The low cost and adaptability of the assay platform lends itself to a number of applications including (i) general RNA/DNA/protein quantitation, (ii) rapid, multiplexed RNA/DNA and protein expression detection, and (iii) sensitive detection of target nucleic acids, peptides, and proteins in both clinical and environmental samples. Additionally, the systems disclosed herein may be adapted for detection of transcripts within biological settings, such as cells. Given the highly specific nature of the CRISPR effectors described herein, it may possible to track allelic specific expression of transcripts or disease-associated mutations in live cells.

[0288] In certain example embodiments, a single guide RNA specific to a single target is placed in separate volumes. Each volume may then receive a different sample or aliquot of the same sample. In certain example embodiments, multiple guide RNA each to separate target may be placed in a single well such that multiple targets may be screened in a different well. In order to detect multiple guide RNAs in a single volume, in certain example embodiments, multiple effector proteins with different specificities may be used. For example, different orthologs with different sequence specificities may be used. For example, one orthologue may preferentially cut A, while others preferentially cut C, U, or T. Accordingly, guide RNAs that are all, or comprise a substantial portion, of a single nucleotide may be generated, each with a different fluorophore. In this way up to four different targets may be screened in a single individual discrete volume.

[0289] As demonstrated herein, the CRISPR effector systems are capable of detecting down to attomolar concentrations of target molecules. See e.g. FIGS. 13, 14, 19, 22 and Examples described below. Due to the sensitivity of said systems, a number of applications that require from the rapid and sensitive detection may benefit from the embodiments disclosed herein, and are contemplated to be within the scope of the invention. Example assays and applications are described in further detail below.

### Microbial Applications

[0290] In certain example embodiments, the systems, devices, and methods, disclosed herein are directed to detecting the presence of one or more microbial agents in a sample, such as a biological sample obtained from a subject. In certain example embodiments, the microbe may be a bacterium, a fungus, a yeast, a protozoa, a parasite, or a virus. Accordingly, the methods disclosed herein can be adapted for use in other methods (or in combination) with other methods that require quick identification of microbe species, monitoring the presence of microbial proteins (antigens), antibodies, antibody genes, detection of certain phenotypes (e.g. bacterial resistance), monitoring of disease progression and/or outbreak, and antibiotic screening. Because of the rapid and sensitive diagnostic capabilities of the embodiments disclosed here, detection of microbe species type, down to a single nucleotide difference, and the ability to be deployed as a POC device, the embodiments disclosed herein may be used guide therapeutic regimens, such as selection of the appropriate antibiotic or antiviral. The embodiments disclosed herein may also be used to screen environmental samples (air, water, surfaces, food etc.) for the presence of microbial contamination.

[0291] Disclosed is a method to identify microbial species, such as bacterial, viral, fungal, yeast, or parasitic species, or the like. Particular embodiments disclosed herein describe methods and systems that will identify and distinguish microbial species within a single sample, or across multiple samples, allowing for recognition of many different microbes. The present methods allow the detection of pathogens and distinguishing between two or more species of one or more organisms, e.g., bacteria, viruses, yeast, protozoa, and fungi or a combination thereof, in a biological or environmental sample, by detecting the presence of a target nucleic acid sequence in the sample. A positive signal obtained from the sample indicates the presence of the microbe. Multiple microbes can be identified simultaneously using the methods and systems of the invention, by employing the use of more than one effector protein, wherein each effector protein targets a specific microbial target sequence. In this way, a multi-level analysis can be performed for a particular subject in which any number of microbes can be detected at once. In some embodiments, simultaneous detection of multiple microbes may be performed using a set of probes that can identify one or more microbial species.

[0292] Multiplex analysis of samples enables large-scale detection of samples, reducing the time and cost of analyses. However, multiplex analyses are often limited by the availability of a biological sample. In accordance with the invention, however, alternatives to multiplex analysis may be performed such that multiple effector proteins can be added to a single sample and each masking construct may be combined with a separate quencher dye. In this case, positive signals may be obtained from each quencher dye separately for multiple detection in a single sample.

[0293] Disclosed herein are methods for distinguishing between two or more species of one or more organisms in a sample. The methods are also amenable to detecting one or more species of one or more organisms in a sample.

### Microbe Detection

[0294] In some embodiments, a method for detecting microbes in samples is provided comprising distributing a sample or set of samples into one or more individual discrete volumes, the individual discrete volumes comprising a CRISPR system as described herein; incubating the sample or set of samples under conditions sufficient to allow binding of the one or more guide RNAs to one or more microbe-specific targets; activating the CRISPR effector protein via binding of the one or more guide RNAs to the one or more target molecules, wherein activating the CRISPR effector protein results in modification of the RNA-based masking construct such that a detectable positive signal is generated; and detecting the detectable positive signal, wherein detection of the detectable positive signal indicates a presence of one or more target molecules in the sample. The one or more target molecules may be mRNA, gDNA (coding or non-coding), trRNA, or RNA comprising a target nucleotide tide sequence that may be used to distinguish two or more microbial species/strains from one another. The guide RNAs may be designed to detect target sequences. The embodiments disclosed herein may also utilize certain steps to improve hybridization between guide RNA and target RNA sequences. Methods for enhancing ribonucleic acid hybridization are disclosed in WO 2015/085194, entitled “Enhanced Methods of Ribonucleic Acid Hybridization” which is incorporated herein by reference. The microbe-specific target may be RNA or DNA or a protein. If DNA method may further comprise the use of DNA primers that introduce a RNA polymerase promoter as described herein. If the target is a protein than the method will utilized aptamers and steps specific to protein detection described herein.

### Detection of Single Nucleotide Variants

[0295] In some embodiments, one or more identified target sequences may be detected using guide RNAs that are specific for and bind to the target sequence as described herein. The systems and methods of the present invention can distinguish even between single nucleotide polymorphisms present among different microbial species and therefore, use of multiple guide RNAs in accordance with the invention may further expand on or improve the number of target sequences that may be used to distinguish between species. For example, in some embodiments, the one or more guide RNAs may distinguish between microbes at the species, genus, family, order, class, phylum, kingdom, or phenotype, or a combination thereof.

Detection Based on rRNA Sequences

[0296] In certain example embodiments, the devices, systems, and methods disclosed herein may be used to distinguish multiple microbial species in a sample. In certain example embodiments, identification may be based on ribosomal RNA sequences, including the 16S, 23S, and 5S subunits. Methods for identifying relevant rRNA sequences are disclosed in U.S. Patent Application Publication No. 2017/0029872. In certain example embodiments, a set of guide RNA may designed to distinguish each species by a variable region that is unique to each species or strain. Guide RNAs may also be designed to target RNA genes that distinguish microbes at the genus, family, order, class, phylum, kingdom levels, or a combination thereof. In certain example embodiments where amplification is used, a set of amplification primers may be designed to flanking constant regions of the ribosomal RNA sequence and a guide RNA designed to distinguish each species by a variable internal region. In certain example embodiments, the primers and guide RNAs may be designed to conserved and variable regions in the 16S subunit respectfully. Other genes or genomic regions that uniquely variable across species or a subset of species such as the RecA gene family, RNA polymerase 3 subunit, may be used as well. Other suitable phylogenetic markers, and methods for identifying the same, are discussed for example in Wu et al. arXiv:1307.8690 [q-bio.GN].

[0297] In certain example embodiments, a method or diagnostic is designed to screen microbes across multiple phylogenetic and/or phenotypic levels at the same time. For example, the method or diagnostic may comprise the use of multiple CRISPR systems with different guide RNAs. A first set of guide RNAs may distinguish, for example, between mycobacteria, gram positive, and gram negative bacteria. These general classes can be even further subdivided. For example, guide RNAs could be designed and used in the method or diagnostic that distinguish enteric and non-enteric within gram negative bacteria. A second set of guide RNA can be designed to distinguish microbes at the genus or species level. Thus a matrix may be produced identifying all mycobacteria, gram positive, gram negative (further divided into enteric and non-enteric) with each genus of species of bacteria identified in a given sample that fall within one of those classes. The foregoing is for example purposes only. Other means for classifying other microbe types are also contemplated and would follow the general structure described above.

### Screening for Drug Resistance

[0298] In certain example embodiments, the devices, systems and methods disclosed herein may be used to screen for microbial genes of interest, for example antibiotic and/or antiviral resistance genes. Guide RNAs may be designed to distinguish between known genes of interest. Samples, including clinical samples, may then be screened using the embodiments disclosed herein for detection of such genes. The ability to screen for drug resistance at POC would have tremendous benefit in selecting an appropriate treatment regime. In certain example embodiments, the antibiotic resistance genes are carbapenemases including KPC, NDM1, CTX-M15, OXA-48. Other antibiotic resistance genes are known and may be found for example in the Comprehensive Antibiotic Resistance Database (Jia et al. “CARD 2017: expansion and model-centric curation of the Comprehensive Antibiotic Resistance Database.” Nucleic Acids Research, 45, D566-573).

[0299] Ribavirin is an effective antiviral that hits a number of RNA viruses. Several clinically important virues have evolved ribavirin resitance including Foot and Mouth Disease Virus doi:10.1128/JVI.03594-13; polio virus (Pfeifer and Kirkegaard. PNAS, 100(12):7289-7294, 2003); and hepatitis C virus (Pfeiffer and Kirkegaard, J. Virol. 79(4):2346-2355, 2005). A number of other persistant RNA viruses, such as hepatitis and HIV, have evolved resitance to existing antiviral drugs: hepatitis B virus (lamivudine, tenofovir, entecavir) doi:10/1002/hep22900; hepatits C virus (telaprevir, BILN2061, ITMN-191, SCh6, boceprevir, AG-021541, ACH-806) doi:10.1002/hep.22549; and HIV (many drug resistance mutations) hivb.standford.edu. The embodiments disclosed herein may be used to detect such variants among others.

[0300] Aside from drug resistance, there are a number of clinically relevant mutations that could be detected with the embodiments disclosed herein, such as persistent versus acute infection in LCMV (doi:10.1073/pnas.1019304108), and increased infectivity of Ebola (Diehl et al. Cell. 2016, 167(4):1088-1098.

[0301] As described herein elsewhere, closely related microbial species (e.g. having only a single nucleotide difference in a given target sequence) may be distinguished by introduction of a synthetic mismatch in the gRNA.

### Set Cover Approaches

[0302] In particular embodiments, a set of guide RNAs is designed that can identify, for example, all microbial species within a defined set of microbes. Such methods are described in In certain example embodiments, the methods for generating guide RNAs as described herein may be compared to methods disclosed in WO 2017/040316, incorporated herein by reference reference. As described in WO 2017040316, a set cover solution may identify the minimal number of target sequences probes or guide RNAs needed to cover an entire target sequence or set of target sequences, e.g. a set of genomic sequences. Set cover approaches have been used previously to identify primers and/or microarray probes, typically in the 20 to 50 base pair range. See, e.g. Pearson et al., cs.virginia.edu/˜robins/papers/primers_dam11_final.pdf., Jabado et al. Nucleic Acids Res. 2006 34(22):6605-11, Jabado et al. Nucleic Acids Res. 2008, 36(1):e3 doi10.1093/nar/gkm1106, Duitama et al. Nucleic Acids Res. 2009, 37(8):2483-2492, Phillippy et al. BMC Bioinformatics. 2009, 10:293 doi:10.1186/1471-2105-10-293. However, such approaches generally involved treating each primer/probe as k-mers and searching for exact matches or allowing for inexact matches using suffix arrays. In addition, the methods generally take a binary approach to detecting hybridization by selecting primers or probes such that each input sequence only needs to be bound by one primer or probe and the position of this binding along the sequence is irrelevant. Alternative methods may divide a target genome into pre-defined windows and effectively treat each window as a separate input sequence under the binary approach—i.e. they determine whether a given probe or guide RNA binds within each window and require that all of the windows be bound by the state of some probe or guide RNA. Effectively, these approaches treat each element of the “universe” in the set cover problem as being either an entire input sequence or a pre-defined window of an input sequence, and each element is considered “covered” if the start of a probe or guide RNA binds within the element. These approaches limit the fluidity to which different probe or guide RNA designs are allowed to cover a given target sequence.

[0303] In contrast, the embodiments disclosed herein are directed to detecting longer probe or guide RNA lengths, for example, in the range of 70 bp to 200 bp that are suitable for hybrid selection sequencing. In addition, the methods disclosed WO 2017/040316 herein may be applied to take a pan-target sequence approach capable of defining a probe or guide RNA sets that can identify and facilitate the detection sequencing of all species and/or strains sequences in a large and/or variable target sequence set. For example, the methods disclosed herein may be used to identify all variants of a given virus, or multiple different viruses in a single assay. Further, the method disclosed herein treat each element of the “universe” in the set cover problem as being a nucleotide of a target sequence, and each element is considered “covered” as long as a probe or guide RNA binds to some segment of a target genome that includes the element. Theses type of set cover methods may used instead of the binary approach of previous methods, the methods disclosed in herein better model how a probe or guide RNA may hybridize to a target sequence. Rather than only asking if a given guide RNA sequence does or does not bind to a given window, such approaches may be used to detect a hybridization pattern—i.e. where a given probe or guide RNA binds to a target sequence or target sequences—and then determines from those hybridization patterns the minimum number of probes or guide RNAs needed to cover the set of target sequences to a degree sufficient to enable both enrichment from a sample and sequencing of any and all target sequences. These hybridization patterns may be determined by defining certain parameters that minimize a loss function, thereby enabling identification of minimal probe or guide RNA sets in a way that allows parameters to vary for each species, e.g. to reflect the diversity of each species, as well as in a computationally efficient manner that cannot be achieved using a straightforward application of a set cover solution, such as those previously applied in the probe or guide RNA design context.

[0304] The ability to detect multiple transcript abundances may allow for the generation of unique microbial signatures indicative of a particular phenotype. Various machine learning techniques may be used to derive the gene signatures. Accordingly, the guide RNAs of the CRISPR systems may be used to identify and/or quantitate relative levels of biomarkers defined by the gene signature in order to detect certain phenotypes. In certain example embodiments, the gene signature indicates susceptibility to an antibiotic, resistance to an antibiotic, or a combination thereof.

[0305] In one aspect of the invention, a method comprises detecting one or more pathogens. In this manner, differentiation between infection of a subject by individual microbes may be obtained. In some embodiments, such differentiation may enable detection or diagnosis by a clinician of specific diseases, for example, different variants of a disease. Preferably the pathogen sequence is a genome of the pathogen or a fragment thereof. The method further may comprise determining the evolution of the pathogen. Determining the evolution of the pathogen may comprise identification of pathogen mutations, e.g. nucleotide deletion, nucleotide insertion, nucleotide substitution. Amongst the latter, there are non-synonymous, synonymous, and noncoding substitutions. Mutations are more frequently non-synonymous during an outbreak. The method may further comprise determining the substitution rate between two pathogen sequences analyzed as described above. Whether the mutations are deleterious or even adaptive would require functional analysis, however, the rate of non-synonymous mutations suggests that continued progression of this epidemic could afford an opportunity for pathogen adaptation, underscoring the need for rapid containment. Thus, the method may further comprise assessing the risk of viral adaptation, wherein the number non-synonymous mutations is determined. (Gire, et al., Science 345, 1369, 2014).

### Monitoring Microbe Outbreaks

[0306] In some embodiments, a CRISPR system or methods of use thereof as described herein may be used to determine the evolution of a pathogen outbreak. The method may comprise detecting one or more target sequences from a plurality of samples from one or more subjects, wherein the target sequence is a sequence from a microbe causing the outbreaks. Such a method may further comprise determining a pattern of pathogen transmission, or a mechanism involved in a disease outbreak caused by a pathogen.

[0307] The pattern of pathogen transmission may comprise continued new transmissions from the natural reservoir of the pathogen or subject-to-subject transmissions (e.g. human-to-human transmission) following a single transmission from the natural reservoir or a mixture of both. In one embodiment, the pathogen transmission may be bacterial or viral transmission, in such case, the target sequence is preferably a microbial genome or fragments thereof. In one embodiment, the pattern of the pathogen transmission is the early pattern of the pathogen transmission, i.e. at the beginning of the pathogen outbreak. Determining the pattern of the pathogen transmission at the beginning of the outbreak increases likelihood of stopping the outbreak at the earliest possible time thereby reducing the possibility of local and international dissemination.

[0308] Determining the pattern of the pathogen transmission may comprise detecting a pathogen sequence according to the methods described herein. Determining the pattern of the pathogen transmission may further comprise detecting shared intra-host variations of the pathogen sequence between the subjects and determining whether the shared intra-host variations show temporal patterns. Patterns in observed intrahost and interhost variation provide important insight about transmission and epidemiology (Gire, et al., 2014).

[0309] Detection of shared intra-host variations between the subjects that show temporal patterns is an indication of transmission links between subject (in particular between humans) because it can be explained by subject infection from multiple sources (superinfection), sample contamination recurring mutations (with or without balancing selection to reinforce mutations), or co-transmission of slightly divergent viruses that arose by mutation earlier in the transmission chain (Park, et al., Cell 161(7):1516-1526, 2015). Detection of shared intra-host variations between subjects may comprise detection of intra-host variants located at common single nucleotide polymorphism (SNP) positions. Positive detection of intra-host variants located at common (SNP) positions is indicative of superinfection and contamination as primary explanations for the intra-host variants. Superinfection and contamination can be parted on the basis of SNP frequency appearing as inter-host variants (Park, et al., 2015). Otherwise superinfection and contamination can be ruled out. In this latter case, detection of shared intra-host variations between subjects may further comprise assessing the frequencies of synonymous and nonsynonymous variants and comparing the frequency of synonymous and nonsynonymous variants to one another. A nonsynonymous mutation is a mutation that alters the amino acid of the protein, likely resulting in a biological change in the microbe that is subject to natural selection. Synonymous substitution does not alter an amino acid sequence. Equal frequency of synonymous and nonsynonymous variants is indicative of the intra-host variants evolving neutrally. If frequencies of synonymous and nonsynonymous variants are divergent, the intra-host variants are likely to be maintained by balancing selection. If frequencies of synonymous and nonsynonymous variants are low, this is indicative of recurrent mutation. If frequencies of synonymous and nonsynonymous variants are high, this is indicative of co-transmission (Park, et al., 2015).

[0310] Like Ebola virus, Lassa virus (LASV) can cause hemorrhagic fever with high case fatality rates. Andersen et al. generated a genomic catalog of almost 200 LASV sequences from clinical and rodent reservoir samples (Andersen, et al., Cell Volume 162, Issue 4, p 738-750, 13 Aug. 2015). Andersen et al. show that whereas the 2013-2015 EVD epidemic is fueled by human-to-human transmissions, LASV infections mainly result from reservoir-to-human infections. Andersen et al. elucidated the spread of LASV across West Africa and show that this migration was accompanied by changes in LASV genome abundance, fatality rates, codon adaptation, and translational efficiency. The method may further comprise phylogenetically comparing a first pathogen sequence to a second pathogen sequence, and determining whether there is a phylogenetic link between the first and second pathogen sequences. The second pathogen sequence may be an earlier reference sequence. If there is a phylogenetic link, the method may further comprise rooting the phylogeny of the first pathogen sequence to the second pathogen sequence. Thus, it is possible to construct the lineage of the first pathogen sequence. (Park, et al., 2015).

[0311] The method may further comprise determining whether the mutations are deleterious or adaptive. Deleterious mutations are indicative of transmission-impaired viruses and dead-end infections, thus normally only present in an individual subject. Mutations unique to one individual subject are those that occur on the external branches of the phylogenetic tree, whereas internal branch mutations are those present in multiple samples (i.e. in multiple subjects). Higher rate of nonsynonymous substitution is a characteristic of external branches of the phylogenetic tree (Park, et al., 2015).

[0312] In internal branches of the phylogenetic tree, selection has had more opportunity to filter out deleterious mutants. Internal branches, by definition, have produced multiple descendent lineages and are thus less likely to include mutations with fitness costs. Thus, lower rate of nonsynonymous substitution is indicative of internal branches (Park, et al., 2015).

[0313] Synonymous mutations, which likely have less impact on fitness, occurred at more comparable frequencies on internal and external branches (Park, et al., 2015).

[0314] By analyzing the sequenced target sequence, such as viral genomes, it is possible to discover the mechanisms responsible for the severity of the epidemic episode such as during the 2014 Ebola outbreak. For example, Gire et al. made a phylogenetic comparison of the genomes of the 2014 outbreak to all 20 genomes from earlier outbreaks suggests that the 2014 West African virus likely spread from central Africa within the past decade. Rooting the phylogeny using divergence from other ebolavirus genomes was problematic (6, 13). However, rooting the tree on the oldest outbreak revealed a strong correlation between sample date and root-to-tip distance, with a substitution rate of 8×10-4 per site per year (13). This suggests that the lineages of the three most recent outbreaks all diverged from a common ancestor at roughly the same time, around 2004, which supports the hypothesis that each outbreak represents an independent zoonotic event from the same genetically diverse viral population in its natural reservoir. They also found out that the 2014 EBOV outbreak might be caused by a single transmission from the natural reservoir, followed by human-to-human transmission during the outbreak. Their results also suggested that the epidemic episode in Sierra Leon might stem from the introduction of two genetically distinct viruses from Guinea around the same time (Gire, et al., 2014).

[0315] It has been also possible to determine how the Lassa virus spread out from its origin point, in particular thanks to human-to-human transmission and even retrace the history of this spread 400 years back (Andersen, et al., Cell 162(4):738-50, 2015).

[0316] In relation to the work needed during the 2013-2015 EBOV outbreak and the difficulties encountered by the medical staff at the site of the outbreak, and more generally, the method of the invention makes it possible to carry out sequencing using fewer selected probes such that sequencing can be accelerated, thus shortening the time needed from sample taking to results procurement. Further, kits and systems can be designed to be usable on the field so that diagnostics of a patient can be readily performed without need to send or ship samples to another part of the country or the world.

[0317] In any method described above, sequencing the target sequence or fragment thereof may used any of the sequencing processes described above. Further, sequencing the target sequence or fragment thereof may be a near-real-time sequencing. Sequencing the target sequence or fragment thereof may be carried out according to previously described methods (Experimental Procedures: Matranga et al., 2014; and Gire, et al., 2014). Sequencing the target sequence or fragment thereof may comprise parallel sequencing of a plurality of target sequences. Sequencing the target sequence or fragment thereof may comprise Illumina sequencing.

[0318] Analyzing the target sequence or fragment thereof that hybridizes to one or more of the selected probes may be an identifying analysis, wherein hybridization of a selected probe to the target sequence or a fragment thereof indicates the presence of the target sequence within the sample.

[0319] Currently, primary diagnostics are based on the symptoms a patient has. However, various diseases may share identical symptoms so that diagnostics rely much on statistics. For example, malaria triggers flu-like symptoms: headache, fever, shivering, joint pain, vomiting, hemolytic anemia, jaundice, hemoglobin in the urine, retinal damage, and convulsions. These symptoms are also common for septicemia, gastroenteritis, and viral diseases. Amongst the latter, Ebola hemorrhagic fever has the following symptoms fever, sore throat, muscular pain, headaches, vomiting, diarrhea, rash, decreased function of the liver and kidneys, internal and external hemorrhage.

[0320] When a patient is presented to a medical unit, for example in tropical Africa, basic diagnostics will conclude to malaria because statistically, malaria is the most probable disease within that region of Africa. The patient is consequently treated for malaria although the patient might not actually have contracted the disease and the patient ends up not being correctly treated. This lack of correct treatment can be life-threatening especially when the disease the patient contracted presents a rapid evolution. It might be too late before the medical staff realizes that the treatment given to the patient is ineffective and comes to the correct diagnostics and administers the adequate treatment to the patient.

[0321] The method of the invention provides a solution to this situation. Indeed, because the number of guide RNAs can be dramatically reduced, this makes it possible to provide on a single chip selected probes divided into groups, each group being specific to one disease, such that a plurality of diseases, e.g. viral infection, can be diagnosed at the same time. Thanks to the invention, more than 3 diseases can be diagnosed on a single chip, preferably more than 4, 5, 6, 7, 8, 9, 10, 11, 12, 13, 14, 15, 16, 17, 18, 19, 20 diseases at the same time, preferably the diseases that most commonly occur within the population of a given geographical area. Since each group of selected probes is specific to one of the diagnosed diseases, a more accurate diagnostics can be performed, thus diminishing the risk of administering the wrong treatment to the patient.

[0322] In other cases, a disease such as a viral infection may occur without any symptoms, or had caused symptoms but they faded out before the patient is presented to the medical staff. In such cases, either the patient does not seek any medical assistance or the diagnostics is complicated due to the absence of symptoms on the day of the presentation.

[0323] The present invention may also be used in concert with other methods of diagnosing disease, identifying pathogens and optimizing treatment based upon detection of nucleic acids, such as mRNA in crude, non-purified samples.

[0324] The method of the invention also provides a powerful tool to address this situation. Indeed, since a plurality of groups of selected guide RNAs, each group being specific to one of the most common diseases that occur within the population of the given area, are comprised within a single diagnostic, the medical staff only need to contact a biological sample taken from the patient with the chip. Reading the chip reveals the diseases the patient has contracted.

[0325] In some cases, the patient is presented to the medical staff for diagnostics of particular symptoms. The method of the invention makes it possible not only to identify which disease causes these symptoms but at the same time determine whether the patient suffers from another disease he was not aware of.

[0326] This information might be of utmost importance when searching for the mechanisms of an outbreak. Indeed, groups of patients with identical viruses also show temporal patterns suggesting a subject-to-subject transmission links.

[0327] In some embodiments, a CRISPR system or methods of use thereof as described herein may be used to predict disease outcome in patients suffering from viral diseases. In specific embodiments, such viral diseases may include, but are not necessarily limited to, Lassa fever. Specific factors related to Lassa fever disease outcome may include but are not necessarily limited to, age, extent of kidney injury, and/or CNS injury.

### Screening Microbial Genetic Perturbations

[0328] In certain example embodiments, the CRISPR systems disclosed herein may be used to screen microbial genetic perturbations. Such methods may be useful, for example to map out microbial pathways and functional networks. Microbial cells may be genetically modified and then screened under different experimental conditions. As described above, the embodiments disclosed herein can screen for multiple target molecules in a single sample, or a single target in a single individual discrete volume in a multiplex fashion. Genetically modified microbes may be modified to include a nucleic acid barcode sequence that identifies the particular genetic modification carried by a particular microbial cell or population of microbial cells. A barcode is s short sequence of nucleotides (for example, DNA, RNA, or combinations thereof) that is used as an identifier. A nucleic acid barcode may have a length of 4-100 nucleotides and be either single or double-stranded. Methods for identifying cells with barcodes are known in the art. Accordingly, guide RNAs of the CRISPR effector systems described herein may be used to detect the barcode. Detection of the positive detectable signal indicates the presence of a particular genetic modification in the sample. The methods disclosed herein may be combined with other methods for detecting complimentary genotype or phenotypic readouts indicating the effect of the genetic modification under the experimental conditions tested. Genetic modifications to be screened may include, but are not limited to a gene knock-in, a gene knock-out, inversions, translocations, transpositions, or one or more nucleotide insertions, deletions, substitutions, mutations, or addition of nucleic acids encoding an epitope with a functional consequence such as altering protein stability or detection. In a similar fashion, the methods described herein may be used in synthetic biology application to screen the functionality of specific arrangements of gene regulatory elements and gene expression modules.

[0329] In certain example embodiments, the methods may be used to screen hypomorphs. Generation of hypomorphs and their use in identifying key bacterial functional genes and identification of new antibiotic therapeutics as disclosed in PCT/US2016/060730 entitled “Multiplex High-Resolution Detection of Micro-organism Strains, Related Kits, Diagnostic Methods and Screening Assays” filed Nov. 4, 2016, which is incorporated herein by reference.

[0330] The different experimental conditions may comprise exposure of the microbial cells to different chemical agents, combinations of chemical agents, different concentrations of chemical agents or combinations of chemical agents, different durations of exposure to chemical agents or combinations of chemical agents, different physical parameters, or both. In certain example embodiments the chemical agent is an antibiotic or antiviral. Different physical parameters to be screened may include different temperatures, atmospheric pressures, different atmospheric and non-atmospheric gas concentrations, different pH levels, different culture media compositions, or a combination thereof.

### Screening Environmental Samples

[0331] The methods disclosed herein may also be used to screen environmental samples for contaminants by detecting the presence of target nucleic acid or polypeptides. For example, in some embodiments, the invention provides a method of detecting microbes, comprising: exposing a CRISPR system as described herein to a sample; activating an RNA effector protein via binding of one or more guide RNAs to one or more microbe-specific target RNAs or one or more trigger RNAs such that a detectable positive signal is produced. The positive signal can be detected and is indicative of the presence of one or more microbes in the sample. In some embodiments, the CRISPR system may be on a substrate as described herein, and the substrate may be exposed to the sample. In other embodiments, the same CRISPR system, and/or a different CRISPR system may be applied to multiple discrete locations on the substrate. In further embodiments, the different CRISPR system may detect a different microbe at each location. As described in further detail above, a substrate may be a flexible materials substrate, for example, including, but not limited to, a paper substrate, a fabric substrate, or a flexible polymer-based substrate.

[0332] In accordance with the invention, the substrate may be exposed to the sample passively, by temporarily immersing the substrate in a fluid to be sampled, by applying a fluid to be tested to the substrate, or by contacting a surface to be tested with the substrate. Any means of introducing the sample to the substrate may be used as appropriate.

[0333] As described herein, a sample for use with the invention may be a biological or environmental sample, such as a food sample (fresh fruits or vegetables, meats), a beverage sample, a paper surface, a fabric surface, a metal surface, a wood surface, a plastic surface, a soil sample, a freshwater sample, a wastewater sample, a saline water sample, exposure to atmospheric air or other gas sample, or a combination thereof. For example, household/commercial/industrial surfaces made of any materials including, but not limited to, metal, wood, plastic, rubber, or the like, may be swabbed and tested for contaminants. Soil samples may be tested for the presence of pathogenic bacteria or parasites, or other microbes, both for environmental purposes and/or for human, animal, or plant disease testing. Water samples such as freshwater samples, wastewater samples, or saline water samples can be evaluated for cleanliness and safety, and/or potability, to detect the presence of, for example, Cryptosporidium parvum, Giardia lamnblia, or other microbial contamination. In further embodiments, a biological sample may be obtained from a source including, but not limited to, a tissue sample, saliva, blood, plasma, sera, stool, urine, sputum, mucous, lymph, synovial fluid, cerebrospinal fluid, ascites, pleural effusion, seroma, pus, or swab of skin or a mucosal membrane surface. In some particular embodiments, an environmental sample or biological samples may be crude samples and/or the one or more target molecules may not be purified or amplified from the sample prior to application of the method. Identification of microbes may be useful and/or needed for any number of applications, and thus any type of sample from any source deemed appropriate by one of skill in the art may be used in accordance with the invention.

[0334] In some embodiments, Checking for food contamination by bacteria, such as E. coli, in restaurants or other food providers; food surfaces; Testing water for pathogens like Salmonella, Campylobacter, or E. coli; also checking food quality for manufacturers and regulators to determine the purity of meat sources; identifying air contamination with pathogens such as legionella; Checking whether beer is contaminated or spoiled by pathogens like Pediococcus and Lactobacillus; contamination of pasteurized or un-pasteurized cheese by bacteria or fungi during manufacture.

[0335] A microbe in accordance with the invention may be a pathogenic microbe or a microbe that results in food or consumable product spoilage. A pathogenic microbe may be pathogenic or otherwise undesirable to humans, animals, or plants. For human or animal purposes, a microbe may cause a disease or result in illness. Animal or veterinary applications of the present invention may identify animals infected with a microbe. For example, the methods and systems of the invention may identify companion animals with pathogens including, but not limited to, kennel cough, rabies virus, and heartworms. In other embodiments, the methods and systems of the invention may be used for parentage testing for breeding purposes. A plant microbe may result in harm or disease to a plant, reduction in yield, or alter traits such as color, taste, consistency, odor, For food or consumable contamination purposes, a microbe may adversely affect the taste, odor, color, consistency or other commercial properties of the food or consumable product. In certain example embodiments, the microbe is a bacterial species. The bacteria may be a psychrotroph, a coliform, a lactic acid bacteria, or a spore-forming bacteria. In certain example embodiments, the bacteria may be any bacterial species that causes disease or illness, or otherwise results in an unwanted product or trait. Bacteria in accordance with the invention may be pathogenic to humans, animals, or plants.

### Sample Types

[0336] Appropriate samples for use in the methods disclosed herein include any conventional biological sample obtained from an organism or a part thereof, such as a plant, animal, bacteria, and the like. In particular embodiments, the biological sample is obtained from an animal subject, such as a human subject. A biological sample is any solid or fluid sample obtained from, excreted by or secreted by any living organism, including, without limitation, single celled organisms, such as bacteria, yeast, protozoans, and amoebas among others, multicellular organisms (such as plants or animals, including samples from a healthy or apparently healthy human subject or a human patient affected by a condition or disease to be diagnosed or investigated, such as an infection with a pathogenic microorganism, such as a pathogenic bacteria or virus). For example, a biological sample can be a biological fluid obtained from, for example, blood, plasma, serum, urine, stool, sputum, mucous, lymph fluid, synovial fluid, bile, ascites, pleural effusion, seroma, saliva, cerebrospinal fluid, aqueous or vitreous humor, or any bodily secretion, a transudate, an exudate (for example, fluid obtained from an abscess or any other site of infection or inflammation), or fluid obtained from a joint (for example, a normal joint or a joint affected by disease, such as rheumatoid arthritis, osteoarthritis, gout or septic arthritis), or a swab of skin or mucosal membrane surface.

[0337] A sample can also be a sample obtained from any organ or tissue (including a biopsy or autopsy specimen, such as a tumor biopsy) or can include a cell (whether a primary cell or cultured cell) or medium conditioned by any cell, tissue or organ. Exemplary samples include, without limitation, cells, cell lysates, blood smears, cytocentrifuge preparations, cytology smears, bodily fluids (e.g., blood, plasma, serum, saliva, sputum, urine, bronchoalveolar lavage, semen, etc.), tissue biopsies (e.g., tumor biopsies), fine-needle aspirates, and/or tissue sections (e.g., cryostat tissue sections and/or paraffin-embedded tissue sections). In other examples, the sample includes circulating tumor cells (which can be identified by cell surface markers). In particular examples, samples are used directly (e.g., fresh or frozen), or can be manipulated prior to use, for example, by fixation (e.g., using formalin) and/or embedding in wax (such as formalin-fixed paraffin-embedded (FFPE) tissue samples). It will appreciated that any method of obtaining tissue from a subject can be utilized, and that the selection of the method used will depend upon various factors such as the type of tissue, age of the subject, or procedures available to the practitioner. Standard techniques for acquisition of such samples are available in the art. See, for example Schluger et al., J. Exp. Med. 176:1327-33 (1992); Bigby et al., Am. Rev. Respir. Dis. 133:515-18 (1986); Kovacs et al., NEJM 318:589-93 (1988); and Ognibene et al., Am. Rev. Respir. Dis. 129:929-32 (1984).

[0338] In other embodiments, a sample may be an environmental sample, such as water, soil, or a surface such as industrial or medical surface. In some embodiments, methods such as disclosed in US patent publication No. 2013/0190196 may be applied for detection of nucleic acid signatures, specifically RNA levels, directly from crude cellular samples with a high degree of sensitivity and specificity. Sequences specific to each pathogen of interest may be identified or selected by comparing the coding sequences from the pathogen of interest to all coding sequences in other organisms by BLAST software.

[0339] Several embodiments of the present disclosure involve the use of procedures and approaches known in the art to successfully fractionate clinical blood samples. See, e.g. the procedure described in Han Wei Hou et al., Microfluidic Devices for Blood Fractionation, Micromachines 2011, 2, 319-343; Ali Asgar S. Bhagat et al., Dean Flow Fractionation (DFF) Isolation of Circulating Tumor Cells (CTCs) from Blood, 15^{th} International Conference on Miniaturized Systems for Chemistry and Life Sciences, Oct. 2-6, 2011, Seattle, Wash.; and International Patent Publication No. WO2011109762, the disclosures of which are herein incorporated by reference in their entirety. Blood samples are commonly expanded in culture to increase sample size for testing purposes. In some embodiments of the present invention, blood or other biological samples may be used in methods as described herein without the need for expansion in culture.

[0340] Further, several embodiments of the present disclosure involve the use of procedures and approaches known in the art to successfully isolate pathogens from whole blood using spiral microchannel, as described in Han Wei Hou et al., Pathogen Isolation from Whole Blood Using Spiral Microchannel, Case No. 15995JR, Massachusetts Institute of Technology, manuscript in preparation, the disclosure of which is herein incorporated by reference in its entirety.

[0341] Owing to the increased sensitivity of the embodiments disclosed herein, in certain example embodiments, the assays and methods may be run on crude samples or samples where the target molecules to be detected are not further fractionated or purified from the sample.

### Example Microbes

[0342] The embodiment disclosed herein may be used to detect a number of different microbes. The term microbe as used herein includes bacteria, fungus, protozoa, parasites and viruses.

### Bacteria

[0343] The following provides an example list of the types of microbes that might be detected using the embodiments disclosed herein. In certain example embodiments, the microbe is a bacterium. Examples of bacteria that can be detected in accordance with the disclosed methods include without limitation any one or more of (or any combination of) Acinetobacter baumanii, Actinobacillus sp., Actinomycetes, Actinomyces sp. (such as Actinomyces israelii and Actinomyces naeslundii), Aeromonas sp. (such as Aeromonas hydrophila, Aeromonas veronii biovar sobria (Aeromonas sobria), and Aeromonas caviae), Anaplasma phagocytophilum, Anaplasma marginale Alcaligenes xylosoxidans, Acinetobacter baumanii, Actinobacillus actinomycetemcomitans, Bacillus sp. (such as Bacillus anthracis, Bacillus cereus, Bacillus subtilis, Bacillus thuringiensis, and Bacillus stearothermophilus), Bacteroides sp. (such as Bacteroides fragilis), Bartonella sp. (such as Bartonella bacilliformis and Bartonella henselae, Bifidobacterium sp., Bordetella sp. (such as Bordetella pertussis, Bordetella parapertussis, and Bordetella bronchiseptica), Borrelia sp. (such as Borrelia recurrentis, and Borrelia burgdorferi), Brucella sp. (such as Brucella abortus, Brucella canis, Brucella melintensis and Brucella suis), Burkholderia sp. (such as Burkholderia pseudomallei and Burkholderia cepacia), Campylobacter sp. (such as Campylobacter jejuni, Campylobacter coli, Campylobacter lari and Campylobacter fetus), Capnocytophaga sp., Cardiobacterium hominis, Chlamydia trachomatis, Chlamydophila pneumoniae, Chlamydophila psittaci, Citrobacter sp. Coxiella burnetii, Corynebacterium sp. (such as, Corynebacterium diphtheriae, Corynebacterium jeikeum and Corynebacterium), Clostridium sp. (such as Clostridium perfringens, Clostridium dificile, Clostridium botulinum and Clostridium tetani), Eikenella corrodens, Enterobacter sp. (such as Enterobacter aerogenes, Enterobacter agglomerans, Enterobacter cloacae and Escherichia coli, including opportunistic Escherichia coli, such as enterotoxigenic E. coli, enteroinvasive E. coli, enteropathogenic E. coli, enterohemorrhagic E. coli, enteroaggregative E. coli and uropathogenic E. coli) Enterococcus sp. (such as Enterococcus faecalis and Enterococcus faecium) Ehrlichia sp. (such as Ehrlichia chafeensia and Ehrlichia canis), Epidermophyton floccosum, Erysipelothrix rhusiopathiae, Eubacterium sp., Francisella tularensis, Fusobacterium nucleatum, Gardnerella vaginalis, Gemella morbillorum, Haemophilus sp. (such as Haemophilus influenzae, Haemophilus ducreyi, Haemophilus aegyptius, Haemophilus parainfluenzae, Haemophilus haemolyticus and Haemophilus parahaemolyticus, Helicobacter sp. (such as Helicobacter pylori, Helicobacter cinaedi and Helicobacter fennelliae), Kingella kingii, Klebsiella sp. (such as Klebsiella pneumoniae, Klebsiella granulomatis and Klebsiella oxytoca), Lactobacillus sp., Listeria monocytogenes, Leptospira interrogans, Legionella pneumophila, Leptospira interrogans, Peptostreptococcus sp., Mannheimia hemolytica, Microsporum canis, Moraxella catarrhalis, Morganella sp., Mobiluncus sp., Micrococcus sp., Mycobacterium sp. (such as Mycobacterium leprae, Mycobacterium tuberculosis, Mycobacterium paratuberculosis, Mycobacterium intracellulare, Mycobacterium avium, Mycobacterium bovis, and Mycobacterium marinum), Mycoplasm sp. (such as Mycoplasma pneumoniae, Mycoplasma hominis, and Mycoplasma genitalium), Nocardia sp. (such as Nocardia asteroides, Nocardia cyriacigeorgica and Nocardia brasiliensis), Neisseria sp. (such as Neisseria gonorrhoeae and Neisseria meningitidis), Pasteurella multocida, Pityrosporum orbiculare (Malassezia furfur), Plesiomonas shigelloides. Prevotella sp., Porphyromonas sp., Prevotella melaninogenica, Proteus sp. (such as Proteus vulgaris and Proteus mirabilis), Providencia sp. (such as Providencia alcalifaciens, Providencia rettgeri and Providencia stuartii), Pseudomonas aeruginosa, Propionibacterium acnes, Rhodococcus equi, Rickettsia sp. (such as Rickettsia rickettsii, Rickettsia akari and Rickettsia prowazekii, Orientia tsutsugamushi (formerly: Rickettsia tsutsugamushi) and Rickettsia typhi), Rhodococcus sp., Serratia marcescens, Stenotrophomonas maltophilia, Salmonella sp. (such as Salmonella enterica, Salmonella typhi, Salmonella paratyphi, Salmonella enteritidis, Salmonella cholerasuis and Salmonella typhimurium), Serratia sp. (such as Serratia marcesans and Serratia liquifaciens), Shigella sp. (such as Shigella dysenteriae, Shigella flexneri, Shigella boydii and Shigella sonnei), Staphylococcus sp. (such as Staphylococcus aureus, Staphylococcus epidermidis, Staphylococcus hemolyticus, Staphylococcus saprophyticus), Streptococcus sp. (such as Streptococcus pneumoniae (for example chloramphenicol-resistant serotype 4 Streptococcus pneumoniae, spectinomycin-resistant serotype 6B Streptococcus pneumoniae, streptomycin-resistant serotype 9V Streptococcus pneumoniae, erythromycin-resistant serotype 14 Streptococcus pneumoniae, optochin-resistant serotype 14 Streptococcus pneumoniae, rifampicin-resistant serotype 18C Streptococcus pneumoniae, tetracycline-resistant serotype 19F Streptococcus pneumoniae, penicillin-resistant serotype 19F Streptococcus pneumoniae, and trimethoprim-resistant serotype 23F Streptococcus pneumoniae, chloramphenicol-resistant serotype 4 Streptococcus pneumoniae, spectinomycin-resistant serotype 6B Streptococcus pneumoniae, streptomycin-resistant serotype 9V Streptococcus pneumoniae, optochin-resistant serotype 14 Streptococcus pneumoniae, rifampicin-resistant serotype 18C Streptococcus pneumoniae, penicillin-resistant serotype 19F Streptococcus pneumoniae, or trimethoprim-resistant serotype 23F Streptococcus pneumoniae), Streptococcus agalactiae, Streptococcus mutans, Streptococcus pyogenes, Group A streptococci, Streptococcus pyogenes, Group B streptococci, Streptococcus agalactiae, Group C streptococci, Streptococcus anginosus, Streptococcus equismilis, Group D streptococci, Streptococcus bovis, Group F streptococci, and Streptococcus anginosus Group G streptococci), Spirillum minus, Streptobacillus moniliformi, Treponema sp. (such as Treponema carateum, Treponema petenue, Treponema pallidum and Treponema endemicum, Trichophyton rubrum, T. mentagrophytes, Tropheryma whippelii, Ureaplasma urealyticum, Veillonella sp., Vibrio sp. (such as Vibrio cholerae, Vibrio parahemolyticus, Vibrio vulnificus, Vibrio parahaemolyticus, Vibrio vulnificus, Vibrio alginolyticus, Vibrio mimicus, Vibrio hollisae, Vibrio fluvialis, Vibrio metchnikovii, Vibrio damsela and Vibrio furnisii), Yersinia sp. (such as Yersinia enterocolitica, Yersinia pestis, and Yersinia pseudotuberculosis) and Xanthomonas maltophilia among others.

### Fungi

[0344] In certain example embodiments, the microbe is a fungus or a fungal species. Examples of fungi that can be detected in accordance with the disclosed methods include without limitation any one or more of (or any combination of), Aspergillus, Blastomyces, Candidiasis, Coccidiodomycosis, Cryptococcus neoformans, Cryptococcus gatti, sp. Histoplasma sp. (such as Histoplasma capsulatum), Pneumocystis sp. (such as Pneumocystis jirovecii), Stachybotrys (such as Stachybotrys chartarum), Mucroymcosis, Sporothrix, fungal eye infections ringworm, Exserohilum, Cladosporium.

[0345] In certain example embodiments, the fungus is a yeast. Examples of yeast that can be detected in accordance with disclosed methods include without limitation one or more of (or any combination of), Aspergillus species (such as Aspergillus fumnigatus, Aspergillus flavus and Aspergillus clavatus), Cryptococcus sp. (such as Cryptococcus neoformans, Cryptococcus gattii, Cryptococcus laurentii and Cryptococcus albidus), a Geotrichum species, a Saccharomyces species, a Hansenula species, a Candida species (such as Candida albicans), a Kluyveromyces species, a Debaryomyces species, a Pichia species, or combination thereof. In certain example embodiments, the fungi is a mold. Example molds include, but are not limited to, a Penicillium species, a Cladosporium species, a Byssochlamys species, or a combination thereof.

### Protozoa

[0346] In certain example embodiments, the microbe is a protozoan. Examples of protozoa that can be detected in accordance with the disclosed methods and devices include without limitation any one or more of (or any combination of), Euglenozoa, Heterolobosea, Diplomonadida, Amoebozoa, Blastocystic, and Apicomplexa. Example Euglenoza include, but are not limited to, Trypanosoma cruzi (Chagas disease), T. brucei gambiense, T. brucei rhodesiense, Leishmania braziliensis, L. infantum, L. mexicana, L. major, L. tropica, and L. donovani. Example Heterolobosea include, but are not limited to, Naegleria fowleri. Example Diplomonadid include, but are not limited to, Giardia intestinalis (G. lamblia, G. duodenalis). Example Amoebozoa include, but are not limited to, Acanthamoeba castellanii, Balamuthia madrillaris, Entamoeba histolytica. Example Blastocystis include, but are not limited to, Blastocystic hominis. Example Apicomplexa include, but are not limited to, Babesia microti, Cryptosporidium parvum, Cyclospora cayetanensis, Plasmodium falciparum, P. vivax, P. ovale, P. malariae, and Toxoplasma gondii. Babesia microti, Cryptosporidium parvum, Cyclospora cayetanensis, Plasmodium falciparum, P. vivax, P. ovale, P. malariae, and Toxoplasma gondii.

### Parasites

[0347] In certain example embodiments, the microbe is a parasite. Examples of parasites that can be detected in accordance with disclosed methods include without limitation one or more of (or any combination of), an Onchocerca species and a Plasmodium species.

### Viruses

[0348] In certain example embodiments, the systems, devices, and methods, disclosed herein are directed to detecting viruses in a sample. The embodiments disclosed herein may be used to detect viral infection (e.g. of a subject or plant), or determination of a viral strain, including viral strains that differ by a single nucleotide polymorphism. The virus may be a DNA virus, a RNA virus, or a retrovirus. Non-limiting example of viruses useful with the present invention include, but are not limited to Ebola, measles, SARS, Chikungunya, hepatitis, Marburg, yellow fever, MERS, Dengue, Lassa, influenza, rhabdovirus or HIV. A hepatitis virus may include hepatitis A, hepatitis B, or hepatitis C. An influenza virus may include, for example, influenza A or influenza B. An HIV may include HIV 1 or HIV 2. In certain example embodiments, the viral sequence may be a human respiratory syncytial virus, Sudan ebola virus, Bundibugyo virus, Tai Forest ebola virus, Reston ebola virus, Achimota, Aedes flavivirus, Aguacate virus, Akabane virus, Alethinophid reptarenavirus, Allpahuayo mammarenavirus, Amapari mmarenavirus, Andes virus, Apoi virus, Aravan virus, Aroa virus, Arumwot virus, Atlantic salmon paramyoxivirus, Australian bat lyssavirus, Avian bornavirus, Avian metapneumovirus, Avian paramyoxviruses, penguin or Falkland Islandsvirus, BK polyomavirus, Bagaza virus, Banna virus, Bat hepevirus, Bat sapovirus, Bear Canon mammarenavirus, Beilong virus, Betacoronoavirus, Betapapillomavirus 1-6, Bhanja virus, Bokeloh bat lyssavirus, Borna disease virus, Bourbon virus, Bovine hepacivirus, Bovine parainfluenza virus 3, Bovine respiratory syncytial virus, Brazoran virus, Bunyamwere virus, Caliciviridae virus. California encephalitis virus, Candiru virus, Canine distemper virus, Canaine pneumovirus, Cedar virus, Cell fusing agent virus, Cetacean morbillivirus, Chandipura virus, Chaoyang virus, Chapare mammarenavirus, Chikungunya virus, Colobus monkey papillomavirus, Colorado tick fever virus, Cowpox virus, Crimean-Congo hemorrhagic fever virus, Culex flavivirus, Cupixi mammarenavirus, Dengue virus, Dobrava-Belgrade virus, Donggang virus, Dugbe virus, Duvenhage virus, Eastern equine encephalitis virus, Entebbe bat virus, Enterovirus A-D, European bat lyssavirus 1-2, Eyach virus, Feline morbillivirus, Fer-de-Lance paramyxovirus, Fitzroy River virus, Flaviviridae virus, Flexal mammarenavirus, GB virus C, Gairo virus, Gemycircularvirus, Goose paramyoxiviurs SF02, Great Island virus, Guanarito mammarenavirus, Hantaan virus, Hantavirus Z10, Heartland virus, Hendra virus, Hepatitis A/B/C/E, Hepatitis delta virus, Human bocavirus, Human coronavirus, Human endogenous retrovirus K, Human enteric coronavirus, Human gential-associated circular DNA virus-1, Human herpesvirus 1-8, Human immunodeficiency virus 1/2, Huan mastadenovirus A-G, Human papillomavirus, Human parainfluenza virus 1-4, Human paraechovirus, Human picobirnavirus, Human smacovirus, Ikoma lyssavirus, Ilheus virus, Influenza A-C, Ippy mammarenavirus, Irkut virus, J-virus, JC polyomavirus, Japanses encephalitis virus, Junin mammarenavirus, KI polyomavirus, Kadipiro virus, Kamiti River virus, Kedougou virus, Khujand virus, Kokobera virus, Kyasanur forest disease virus, Lagos bat virus, Langat virus, Lassa mammarenavirus, Latino mammarenavirus, Leopards Hill virus, Liao ning virus, Ljungan virus, Lloviu virus, Louping ill virus, Lujo mammarenavirus, Luna mammarenavirus, Lunk virus, Lymphocytic choriomeningitis mammarenavirus, Lyssavirus Ozernoe, MSSI2\.225 virus, Machupo mammarenavirus, Mamastrovirus 1, Manzanilla virus, Mapuera virus, Marburg virus, Mayaro virus, Measles virus, Menangle virus, Mercadeo virus, Merkel cell polyomavirus, Middle East respiratory syndrome coronavirus, Mobala mammarenavirus, Modoc virus, Moijang virus, Mokolo virus, Monkeypox virus, Montana myotis leukoenchalitis virus, Mopeia lassa virus reassortant 29, Mopeia mammarenavirus, Morogoro virus, Mossman virus, Mumps virus, Murine pneumonia virus, Murray Valley encephalitis virus, Nariva virus, Newcastle disease virus, Nipah virus, Norwalk virus, Norway rat hepacivirus, Ntaya virus, O'nyong-nyong virus, Oliveros mammarenavirus, Omsk hemorrhagic fever virus, Oropouche virus, Parainfluenza virus 5, Parana mammarenavirus, Parramatta River virus, Peste-des-petits-ruminants virus, Pichande mammarenavirus, Picornaviridae virus, Pirital mammarenavirus, Piscihepevirus A, Procine parainfluenza virus 1, porcine rubulavirus, Powassan virus, Primate T-lymphotropic virus 1-2, Primate erythroparvovirus 1, Punta Toro virus, Puumala virus, Quang Binh virus, Rabies virus, Razdan virus, Reptile bornavirus 1, Rhinovirus A-B, Rift Valley fever virus, Rinderpest virus, Rio Bravo virus, Rodent Torque Teno virus, Rodent hepacivirus, Ross River virus, Rotavirus A-I, Royal Farm virus, Rubella virus, Sabia mammarenavirus, Salem virus, Sandfly fever Naples virus, Sandfly fever Sicilian virus, Sapporo virus, Sathuperi virus, Seal anellovirus, Semliki Forest virus, Sendai virus, Seoul virus, Sepik virus, Severe acute respiratory syndrome-related coronavirus, Severe fever with thrombocytopenia syndrome virus, Shamonda virus, Shimoni bat virus, Shuni virus, Simbu virus, Simian torque teno virus, Simian virus 40-41, Sin Nombre virus, Sindbis virus, Small anellovirus, Sosuga virus, Spanish goat encephalitis virus, Spondweni virus, St. Louis encephalitis virus, Sunshine virus, TTV-like mini virus, Tacaribe mammarenavirus, Taila virus, Tamana bat virus, Tamiami mammarenavirus, Tembusu virus, Thogoto virus, Thottapalayam virus, Tick-borne encephalitis virus, Tioman virus, Togaviridae virus, Torque teno canis virus, Torque teno douroucouli virus, Torque teno felis virus, Torque teno midi virus, Torque teno sus virus, Torque teno tamarin virus, Torque teno virus, Torque teno zalophus virus, Tuhoko virus, Tula virus, Tupaia paramyxovirus, Usutu virus, Uukuniemi virus, Vaccinia virus, Variola virus, Venezuelan equine encephalitis virus, Vesicular stomatitis Indiana virus, WU Polyomavirus, Wesselsbron virus, West Caucasian bat virus, West Nile virus, Western equine encephalitis virus, Whitewater Arroyo mammarenavirus, Yellow fever virus, Yokose virus, Yug Bogdanovac virus, Zaire ebolavirus, Zika virus, or Zygosaccharomyces bailii virus Z viral sequence. Examples of RNA viruses that may be detected include one or more of (or any combination of) Coronaviridae virus, a Picornaviridae virus, a Caliciviridae virus, a Flaviviridae virus, a Togaviridae virus, a Bornaviridae, a Filoviridae, a Paramyxoviridae, a Pneumoviridae, a Rhabdoviridae, an Arenaviridae, a Bunyaviridae, an Orthomyxoviridae, or a Deltavirus. In certain example embodiments, the virus is Coronavirus, SARS, Poliovirus, Rhinovirus, Hepatitis A, Norwalk virus, Yellow fever virus, West Nile virus, Hepatitis C virus, Dengue fever virus, Zika virus, Rubella virus, Ross River virus, Sindbis virus, Chikungunya virus, Borna disease virus, Ebola virus, Marburg virus, Measles virus, Mumps virus, Nipah virus, Hendra virus, Newcastle disease virus, Human respiratory syncytial virus, Rabies virus, Lassa virus, Hantavirus, Crimean-Congo hemorrhagic fever virus, Influenza, or Hepatitis D virus.

[0349] In certain example embodiments, the virus may be a plant virus selected from the group comprising Tobacco mosaic virus (TMV), Tomato spotted wilt virus (TSWV), Cucumber mosaic virus (CMV), Potato virus Y (PVY), the RT virus Cauliflower mosaic virus (CaMV), Plum pox virus (PPV), Brome mosaic virus (BMV), Potato virus X (PVX), Citrus tristeza virus (CTV), Barley yellow dwarf virus (BYDV), Potato leafroll virus (PLRV), Tomato bushy stunt virus (TBSV), rice tungro spherical virus (RTSV), rice yellow mottle virus (RYMV), rice hoja blanca virus (RHBV), maize rayado fino virus (MRFV), maize dwarf mosaic virus (MDMV), sugarcane mosaic virus (SCMV), Sweet potato feathery mottle virus (SPFMV), sweet potato sunken vein closterovirus (SPSVV), Grapevine fanleaf virus (GFLV), Grapevine virus A (GVA), Grapevine virus B (GVB), Grapevine fleck virus (GFkV), Grapevine leafroll-associated virus-1, -2, and -3, (GLRaV-1, -2, and -3), Arabis mosaic virus (ArMV), or Rupestris stem pitting-associated virus (RSPaV). In a preferred embodiment, the target RNA molecule is part of said pathogen or transcribed from a DNA molecule of said pathogen. For example, the target sequence may be comprised in the genome of an RNA virus. It is further preferred that CRISPR effector protein hydrolyzes said target RNA molecule of said pathogen in said plant if said pathogen infects or has infected said plant. It is thus preferred that the CRISPR system is capable of cleaving the target RNA molecule from the plant pathogen both when the CRISPR system (or parts needed for its completion) is applied therapeutically, i.e. after infection has occurred or prophylactically, i.e. before infection has occurred.

[0350] In certain example embodiments, the virus may be a retrovirus. Example retroviruses that may be detected using the embodiments disclosed herein include one or more of or any combination of viruses of the Genus Alpharetrovirus, Betaretrovirus, Gammaretrovirus, Deltaretrovirus, Epsilonretrovirus, Lentivirus, Spumavirus, or the Family Metaviridae, Pseudoviridae, and Retroviridae (including HIV), Hepadnaviridae (including Hepatitis B virus), and Caulimoviridae (including Cauliflower mosaic virus).

[0351] In certain example embodiments, the virus is a DNA virus. Example DNA viruses that may be detected using the embodiments disclosed herein include one or more of (or any combination of) viruses from the Family Myoviridae, Podoviridae, Siphoviridae, Alloherpesviridae, Herpesviridae (including human herpes virus, and Varicella Zozter virus), Malocoherpesviridae, Lipothrixviridae, Rudiviridae, Adenoviridae, Ampullaviridae, Ascoviridae, Asfarviridae (including African swine fever virus), Baculoviridae, Cicaudaviridae, Clavaviridae, Corticoviridae, Fuselloviridae, Globuloviridae, Guttaviridae, Hytrosaviridae, Iridoviridae, Maseilleviridae, Mimiviridae, Nudiviridae, Nimaviridae, Pandoraviridae, Papillomaviridae, Phycodnaviridae, Plasmaviridae, Polydnaviruses, Polyomaviridae (including Simian virus 40, JC virus, BK virus), Poxviridae (including Cowpox and smallpox), Sphaerolipoviridae, Tectiviridae, Turriviridae, Dinodnavirus, Salterprovirus, Rhizidovirus, among oln some embodiments, a method of diagnosing a species-specific bacterial infection in a subject suspected of having a bacterial infection is described as obtaining a sample comprising bacterial ribosomal ribonucleic acid from the subject; contacting the sample with one or more of the probes described, and detecting hybridization between the bacterial ribosomal ribonucleic acid sequence present in the sample and the probe, wherein the detection of hybridization indicates that the subject is infected with Escherichia coli, Klebsiella pneumoniae, Pseudomonas aeruginosa, Staphylococcus aureus, Acinetobacter baumannii, Candida albicans, Enterobacter cloacae, Enterococcus faecalis, Enterococcus faecium, Proteus mirabilis, Staphylococcus agalactiae, or Staphylococcus maltophilia or a combination thereof.

[0352] In certain example embodiments, the virus is a virus listed in Table 8 below, or a virus of the indicated genus/family.

TABLE 8

| Virus | Genus, Family | Host | Transmission | Disease |
|---|---|---|---|---|
| Adeno-associated | Dependovirus | Human, | Respiratory | None |
| virus | | vertebrates | | |
| Aichi virus | Kobuvirus, | Human | Fecal-oral | Gastroenteritis |
| | Picornaviridae | | | |
| Australian bat | Lyssavirus, | Human, bats | Zoonosis, | Fatal encephalitis |
| lyssavirus | Rhabdoviridae | | animal bite | |
| BK polyomavirus | Polyomavirus, | Human | Respiratory | None |
| | Polyomaviridae | | fluids or urine | |
| Banna virus | Seadornavirus, | Human, cattle, | Zoonosis, | Encephalitis |
| | Reoviridae | pig, | arthropod bite | |
| | | mosquitoes | | |
| Barmah forest virus | Alphavirus, | Human, | Zoonosis, | Fever, joint pain |
| | Togaviridae | marsupials, | arthropod bite | |
| | | mosquitoes | | |
| Bunyamwera virus | Orthobunyavirus, | Human, | Zoonosis, | Encephalitis |
| | Bunyaviridae | mosquitoes | arthropod bite | |
| Bunyavirus La Crosse | Orthobunyavirus, | Human, deer, | Zoonosis, | Encephalitis |
| | Bunyaviridae | mosquitoes, | arthropod bite | |
| | | tamias | | |
| Bunyavirus snowshoe | Orthobunyavirus, | Human, | Zoonosis, | Encephalitis |
| hare | Bunyaviridae | rodents, | arthropod bite | |
| | | mosquitoes | | |
| Cercopithecine | Lymphocryptovirus, | Human, | Zoonosis, | Encephalitis |
| herpesvirus | Herpesviridae | monkeys | animal bite | |
| Chandipura virus | Vesiculovirus, | Human, | Zoonosis, | Encephalitis |
| | Rhabdoviridae | sandflies | athropod bite | |
| Chikungunya virus | Alphavirus, | Human, | Zoonosis, | Fever, joint pain |
| | Togaviridae | monkeys, | arthropod bite | |
| | | mosquitoes | | |
| Cosavirus A | Cosavirus, | Human | Fecal-oral | — |
| | Picornaviridae | | (probable) | |
| Cowpox virus | Orthopoxvirus, | Human, | Zoonosis, | None |
| | Poxviridae | mammals | contact | |
| Coxsackievirus | Enterovirus, | Human | Fecal-oral | Meningitis, |
| | Picornaviridae | | | myocarditis, |
| | | | | paralysis |
| Crimean-Congo | Nairovirus, | Human, | Zoonosis, | Hemorrhagic fever |
| hemorrhagic fever | Bunyaviridae | vertebrates, | arthropod bite | |
| virus | | ticks | | |
| Dengue virus | Flavivirus, | Human, | Zoonosis, | Hemorrhagic fever |
| | Flaviviridae | mosquitoes | arthropod bite | |
| Dhori virus | Thogotovirus, | Human, ticks | Zoonosis, | Fever, encephalitis |
| | Orthomyxoviridae | | arthropod bite | |
| Dugbe virus | Nairovirus, | Human, ticks | Zoonosis, | Thrombocytopaenia |
| | Bunyaviridae | | arthropod bite | |
| Duvenhage virus | Lyssavirus, | Human. | Zoonosis, | Fatal encephalitis |
| | Rhabdoviridae | mammals | animal bite | |
| Eastern equine | Alphavirus, | Human, birds, | Zoonosis, | Encephalitis |
| encephalitis virus | Togaviridae | mosquitoes | arthropod bite | |
| Ebolavirus | Ebolavirus, | Human, | Zoonosis, | Hemorrhagic fever |
| | Filoviridae | monkeys, bats | contact | |
| Echovirus | Enterovirus, | Human | Fecal-oral | Common cold |
| | Picornaviridae | | | |
| Encephalomyocarditis | Cardiovirus, | Human, | Zoonosis | Encephalitis |
| virus | Picornaviridae | mouse, rat. pig | | |
| Epstein-Barr virus | Lymphocryptovirus, | Human | Contact, | Mononucleosis |
| | Herpesviridae | | saliva | |
| European bat | Lyssavirus, | Human, bats | Zoonosis, | Fatal encephalitis |
| lyssavirus | Rhabdovirus | | animal bite | |
| GB virus C/Hepatitis | Pegivirus, | Human | Blood, | None |
| G virus | Flaviviridae | | occasionally | |
| | | | sexual | |
| Hantaan virus | Hantavirus, | Human, | Zoonosis, | Renal or respiratory |
| | Bunyaviridae | rodents | urine, saliva | svndrome |
| Hendra virus | Henipavirus, | Human, horse, | Zoonosis, | Encephalitis |
| | paramyxoviridae | bats | animal bite | |
| Hepatitis A virus | Hepatovirus, | Human | Fecal-oral | Hepatitis |
| | picornaviridae | | | |
| Hepatitis B virus | Orthohepadnavirus, | Human, | Sexual | Hepatitis |
| | Hepadnaviridae | Chimpanzees | contact, blood | |
| Hepatitis C virus | Hepacivirus, | Human | Sexual, blood | Hepatitis |
| | Flaviviridae | | | |
| Hepatitis E virus | Hepevirus, | Human, pig, | Zoonosis, | Hepatitis |
| | Unassigned | monkeys, | food | |
| | | some rodents, | | |
| | | chicken | | |
| Hepatitis delta virus | Deltavirus, | Human | Sexual | Hepatitis |
| | Unassigned | | contact, blood | |
| Horsepox virus | Orthopoxvirus, | Human, horses | Zoonosis, | None |
| | Poxviridae | | contact | |
| Human adenovirus | Mastadenovirus, | Human | Respiratory, | Respiratory |
| | Adenoviridae | | fecal-oral | |
| Human astrovirus | Mamastrovirus, | Human | Fecal-oral | Gastroenteritis |
| | Astroviridae | | | |
| Human coronavirus | Alphacoronavirus, | Human | Respiratory | Respiratory |
| | Coronaviridae | | | |
| Human | Cytomegalovirus, | Human | Contact, | Mononucleosis, |
| cytomegalovirus | Herpesviridae | | urine, saliva | pneumonia |
| Human enterovirus | Enterovirus, | Human | Fecal-oral | Diarrhea, |
| 68, 70 | Picornaviridae | | | neurological |
| | | | | disorder |
| Human herpesvirus 1 | Simplexvirus, | Human | Sexual | Skin lesions |
| | Herpesviridae | | contact, saliva | |
| Human herpesvirus 2 | Simplexvirus, | Human | Sexual | Skin lesions |
| | Herpesviridae | | contact, saliva | |
| Human herpesvirus 6 | Roseolovirus, | Human | Respiratory. | Skin lesions |
| | Herpesviridae | | contact | |
| Human herpesvirus 7 | Roseolovirus, | Human | Respiratory, | Skin lesions |
| | Herpesviridae | | contact | |
| Human herpesvirus 8 | Rhadinovirus, | Human | Sexual | Skin lymphoma |
| | Herpesviridae | | contact, saliva | |
| Human | Lentivirus, | Human | Sexual | AIDS |
| immunodeficiency | Retroviridae | | contact, blood | |
| virus | | | | |
| Human | Mupapillomavirus, | Human | Contact | Skin warts |
| papillomavirus 1 | Papillomaviridae | | | |
| Human | Alphapapillomavirus, | Human | Contact | Skin warts |
| papillomavirus 2 | Papillomaviridae | | | |
| Human | Alphapapillomavirus, | Human | Sexual | Genital warts, |
| papillomavirus 16, 18 | Papillomaviridae | | | cervical cancer |
| Human parainfluenza | Respirovirus, | Human | Respiratory | Respiratory |
| | Paramyxoviridae | | | |
| Human parvovirus | Erythrovirus, | Human | Respiratory | Skin lesion |
| B19 | Parvoviridae | | | |
| Human respiratory | Pneumovirus, | Human | Respiratory | Respiratory |
| syncytial virus | Paramyxoviridae | | | |
| Human rhinovirus | Enterovirus | Human | Respiratory | Respiratory |
| Human SARS | Betacoronavirus, | Human, palm | Zoonosis | Respiratory |
| coronavirus | Coronaviridae | civet | | |
| Human | Spumavirus, | Human | Contact, | None |
| spumaretrovirus | Retroviridae | | saliva | |
| Human T- | Deltaretrovirus, | Human | Sexual | Leukemia |
| lymphotropic virus | Retroviridae | | contact, | |
| | | | maternal- | |
| | | | neonatal | |
| Human torovirus | Torovirus, | Human | Fecal-oral | Gastroenteritis |
| | Coronaviridae | | | |
| Influenza A virus | Influenzavirus A, | Human, birds, | Respiratory or | Flu |
| | Orthomyxoviridae | pigs | Zoonosis, | |
| | | | animal | |
| | | | contact | |
| Influenza B virus | Influenzavirus B, | Human | Respiratory | Flu |
| | Orthomyxoviridae | | | |
| Influenza C virus | Influenzavirus C, | Human | Respiratory | Flu |
| | Orthomyxoviridae | | | |
| Isfahan virus | Vesiculovirus, | Human, | Zoonosis, | Undocumented, |
| | Rhabdoviridae | sandflies, | arthropod bite | encephalitis? |
| | | gerbils | | |
| JC polyomavirus | Polyomavirus, | Human | Fecal-oral or | Encephalitis |
| | Polyomaviridae | | urine | |
| Japanese encephalitis | Flavivirus, | Human, | Zoonosis, | Encephalitis |
| virus | Flaviviridae | horses, birds, | arthropod | |
| | | mosquitoes | borne | |
| Junin arenavirus | Arenavirus, | Human, | Zoonosis, | Hemorrhagic fever |
| | Arenaviridae | rodents | fomite | |
| KI Polyomavirus | Polyomavirus, | Human | Fecal-oral or | Encephalitis |
| | Polyomaviridae | | urine | |
| Kunjin virus | Flavivirus, | Human, | Zoonosis, | Encephalitis |
| | Flaviviridae | horses, birds, | arthropod | |
| | | mosquitoes | borne | |
| Lagos bat virus | Lyssavirus, | Human, | Zoonosis, | Fatal encephalitis |
| | Rhabdoviridae | mammals | animal bite | |
| Lake Victoria | Marburgvirus, | Human, | Zoonosis, | Hemorrhagic fever |
| marburgvirus | Filoviridae | monkeys, bats | fomite | |
| Langat virus | Flavivirus, | Human, ticks | Zoonosis, | Encephalitis |
| | Flaviviridae | | arthropod | |
| | | | borne | |
| Lassa virus | Arenavirus, | Human, rats | Zoonosis, | Hemorrhagic fever |
| | Arenaviridae | | fomites | |
| Lordsdale virus | Norovirus, | Human | Fecal-oral | Gastroenteritis |
| | Caliciviridae | | | |
| Louping ill virus | Flavivirus, | Human, | Zoonosis, | Encephalitis |
| | Flaviviridae | mammals, | arthropod bite | |
| | | ticks | | |
| Lymphocytic | Arenavirus, | Human, | Zoonosis, | Encephalitis |
| choriomeningitis | Arenaviridae | rodents | fomite | |
| virus | | | | |
| Machupo virus | Arenavirus, | Human, | Zoonosis, | Encephalitis |
| | Arenaviridae | monkeys, | fomite | |
| | | mouse | | |
| Mayaro virus | Alphavirus, | Human, | Zoonosis, | Fever, joint pain |
| | Togaviridae | mosquitoes | arthropod bite | |
| MERS coronavirus | Betacoronavirus, | Human, Tomb | Zoonosis | Respiratory |
| | Coronaviridae | bat | | |
| Measles virus | Morbilivirus, | Human | Respiratory | Fever, rash |
| | Paramyxoviridae | | | |
| Mengo | Cardiovirus, | Human, | Zoonosis | Encephalitis |
| encephalomyocarditis | Picornaviridae | mouse, rabbit | | |
| virus | | | | |
| Merkel cell | Polyomavirus, | Human | — | Merkel cell |
| polyomavirus | Polyomaviridae | | | carcinoma |
| Mokola virus | Lyssavirus, | Human, | Zoonosis, | Encephalitis |
| | Rhabdoviridae | rodents, cat, | animal bite | |
| | | dog shrew | | |
| Molluscum | Molluscipoxvirus, | Human | Contact | Skin lesions |
| contagiosiun virus | Poxviridae | | | |
| Monkeypox virus | Orthopoxvirus | Human, | Zoonosis, | Skin lesions |
| | | mouse, prairie | contact | |
| | | dog | | |
| Mumps virus | Rubulavirus, | Human | Respiratory, | Mumps |
| | Paramyxoviridae | | saliva | |
| Murray valley | Flavivirus | Human, | Zoonosis, | Encephalitis |
| encephalitis virus | | mosquitoes | arthropod bite | |
| New York virus | Hantavirus, | Human, mouse | Zoonosis, | Hemorrhagic fever |
| | Bunyavirus | | urine, saliva | |
| Nipah virus | Henipavirus, | Human, bats | Zoonosis, | Encephalitis |
| | Paramyxoviridae | | animal bite | |
| Norwalk virus | Norovirus, | Human | Fecal-oral | Gastroenteritis |
| | Caliciviridae | | | |
| O'nyong-nyong virus | Alphavirus, | Human, | Zoonosis, | Fever, joint pain |
| | Togaviridae | mosquitoes | arthropod bite | |
| Orf virus | Parapoxvirus, | Human, | Zoonosis, | Skin lesions |
| | Poxviridae | mammals | contact | |
| Oropouche virus | Orthobunyavirus | Human, wild | Zoonosis, | Fever, joint pain |
| | | animals(sloths) | arthropod bite | |
| Pichinde virus | Arenavirus, | Human, rat, | Zoonosis, | Hemorrhagic fever |
| | Arenaviridae | guinea pig | fomite | |
| Poliovirus | Enterovirus, | Human, | Fecal-oral | Poliomyelitis |
| | Picornaviridae | mammals | | |
| Punta toro | Phlebovirus, | Human, | Zoonosis, | Hemorrhagic fever |
| phlebovirus | Bunyaviridae | sandflies | arthropod bite | |
| Puumala virus | Hantavirus, | Human, bank | Zoonosis, | Hemorrhagic fever |
| | Bunyavirus | vole | urine, saliva | |
| Rabies virus | Lyssavirus, | Human, | Zoonosis, | Fatal encephalitis |
| | Rhabdoviridae | mammals | animal bite | |
| Rift valley fever virus | Phlebovirus, | Human, | Zoonosis, | Hemorrhagic fever |
| | Bunyaviridae | mammals, | arthropod bite | |
| | | mosquitoes, | | |
| | | sandflies | | |
| Rosavirus A | Rosavirus, | Human | | |
| | Picornaviridae | | | |
| Ross river virus | Alphavirus, | Human, | Zoonosis, | Fever, joint pain |
| | Togaviridae | mosquitoes, | arthropod bite | |
| | | marsupials | | |
| Rotavirus A | Rotavirus, | Human | Fecal-oral | Gastroenteritis |
| | Reoviridae | | | |
| Rotavirus B | Rotavirus, | Human | Fecal-oral | Gastroenteritis |
| | Reoviridae | | | |
| Rotavirus C | Rotavirus, | Human | Fecal-oral | Gastroenteritis |
| | Reoviridae | | | |
| Rubella virus | Rubivirus, | Human | Respiratory | Rubella |
| | Togaviridae | | | |
| Sagiyama virus | Alphavirus, | Human, horse, | Zoonosis, | Fever, joint pain |
| | Togaviridae | pig, | arthropod bite | |
| | | mosquitoes | | |
| Salivirus A | Salivirus, | Human | | Gastroenteritis |
| | Picornaviridae | | | |
| Sandfly fever sicilian | Phlebovirus, | Human, | Zoonosis, | Hemorrhagic fever |
| virus | Bunyaviridae | sandflies | arthropod bite | |
| Sapporo virus | Sapovirus, | Human | Fecal-oral | Gastroenteritis |
| | Caliciviridae | | | |
| Semliki forest virus | Alphavirus, | Human, birds, | Zoonosis, | Fever, joint pain |
| | Togaviridae | hedgehog, | arthropod bite | |
| | | mosquitoes | | |
| Seoul virus | Hantavirus, | Human, rats | Zoonosis, | Hemorrhagic fever |
| | Bunyavirus | | urine, saliva | |
| Simian foamy virus | Spumavirus, | Human, | Zoonosis, | None |
| | Retroviridae | monkeys | contact | |
| Simian virus 5 | Rubulavirus, | Human, dog | Zoonosis, | Undocumented |
| | Paramyxoviridae | | contact | |
| Sindbis virus | Alphavirus, | Human, birds, | Zoonosis, | Pogosta_disease |
| | Togaviridae | mosquitoes | arthropod bite | Fever, joint pain |
| Southampton virus | Norovirus, | Human | Fecal-oral | Gastroenteritis |
| | Caliciviridae | | | |
| St. louis encephalitis | Flavivirus, | Human, birds, | Zoonosis, | Encephalitis |
| virus | Flaviviridae | mosquitoes | arthropod bite | |
| Tick-borne powassan | Flavivirus, | Human, ticks | Zoonosis, | Encephalitis |
| virus | Flaviviridae | | arthropod bite | |
| Torque teno virus | Alphatorquevirus | Human | Sexual, blood | None |
| Toscana virus | Phlebovirus, | Human, | Zoonosis, | Hemorrhagic fever |
| | Bunyaviridae | mosquitoes | arthropod bite | |
| Uukuniemi virus | Phlebovirus, | Human, ticks | Zoonosis, | Hemorrhagic fever |
| | Bunyaviridae | | arthropod bite | |
| Vaccinia virus | Orthopoxvirus, | Human, | Contact | None |
| | Poxviridae | mammals | | |
| Varicella-zoster virus | Varicellovirus, | Human | Respiratory, | Varicella |
| | Herpesviridae | | contact | |
| Variola virus | Orthopoxvirus, | Human | Respiratory | Variola |
| | Poxviridae | | | |
| Venezuelan equine | Alphavirus, | Human, | Zoonosis, | Fever, joint pain |
| encephalitis virus | Togaviridae | rodents, | arthropod bite | |
| | | mosquitoes | | |
| Vesicular stomatitis | Vesiculovirus, | Human, cattle, | Zoonosis, | Encephalitis |
| virus | Rhabdoviridae | horse, pig, | athropod bite | |
| | | flies | | |
| Western equine | Alphavirus, | Human, | Zoonosis, | Fever, joint pain |
| encephalitis virus | Togaviridae | vertebrates, | arthropod bite | |
| | | mosquitoes | | |
| WU polyomavirus | Polyomavirus, | Human | Respiratory | None |
| | Polyomaviridae | | fluids or urine | |
| West Nile virus | Flavivirus, | Human, birds, | Zoonosis, | Hemorrhagic fever |
| | Flaviviridae | ticks, | arthropod bite | |
| | | mosquitoes | | |
| Yaba monkey tumor | Orthopoxvirus, | Human, | Zoonosis, | None |
| virus | Poxviridae | monkeys | contact | |
| Yaba-like disease | Orthopoxvirus, | Human, | Zoonosis, | None |
| virus | Poxviridae | monkeys | contact | |
| Yellow fever virus | Flavivirus, | Human, | Zoonosis, | Hemorrhagic fever |
| | Flaviviridae | monkeys, | arthropod bite | |
| | | mosquitoes | | |
| Zika virus | Flavivirus, | Human, | Zoonosis, | Fever, joint pain, |
| | Flaviviridae | monkeys, | arthropod bite | rash |
| | | mosquitoes | | |

[0353] In certain embodiments, the virus is the virus is a virus listed in the Table below.

| Virus | Tissue/cell type | Citation |
|---|---|---|
| Lassa virus | DCs, vascular endothelial cells | Kunz, S. et. al. 2005. Journal of |
| | | Virology |
| Ebola virus | Numerous (DCs, macrophages, | Martines, R. B. et. al. 2015. |
| | hepatocytes, etc.) | Journal of Pathology. |
| SARS-CoV | Lung | To, K F. et. al. 2004. Journal of |
| | | Pathology. |
| Zika | Numerous (bodily fluids, | Miner, J. J. & Diamond, M. S. |
| | placenta, brain, etc.) | 2017. Cell Host & Microbe. |
| Dengue | Numerous (DCs, macrophages, | Flipse, J. et. al. 2016. Journal of |
| | liver, etc.) | General Virology. |
| Chikungunya | Numerous (immune cells, liver, | Schwartz, O. & Albert, M. L. 2010. |
| | central nervous system, etc.) | Nature Reviews. |
| Influenza | Lung epithelial cells or | Medina, R. A. & Garcia-Sastre A. |
| | macrophages | 2011 Nature Reviews. |
| HIV | T cells, macrophages | Weiss, R. A. 2002. IUBMB Life. |
| Rotavirus | Intestine | Lopez, S & Arias. C. F. 2006. |
| | | CTMI |
| Herpes Simplex (HSV-1) | Epithelial cells, neuronal cells | Schelhaas. M. et. al. 2003. Journal |
| | | of General Virology. |
| HCV | Liver | Ding, Q, et. al. 2014. Cell Host & |
| | | Microbe. |
| HBV | Liver | Schieck. A. et. al. 2013. |
| | | Hepatology. |

[0354] In certain embodiments, the virus is a virus listed in Table 9 below.

TABLE 9
List of Viruses with FDA-Approved Vaccines (15-16):

| | |
|---|---|
| 1. | Adenovirus |
| 2. | Hepatitis A |
| 3. | Hepatitis B |
| 4. | Human Papillomavirus (HPV) |
| 5. | Influenza |
| 6. | Japanese Encephalitis Virus |
| 7. | Measles |
| 8. | Mumps |
| 9. | Polio |
| 10. | Rabies |
| 11. | Rotavirus |
| 12. | Rubella |
| 13. | Shingles/Zoster (HSV) |
| 14. | Smallpox* |
| 15. | Varicella (Chicken Pox) |
| 16. | Yellow Fever |

List of Viruses with FDA-Approved Antiviral Drugs (9):

| | |
|---|---|
| 1. | Cytomegalovirus |
| 2. | Human Immunodeficiency Virus (HIV) |
| 3. | Hepatitis B |
| 4. | Hepatitis C |
| 5. | Influenza |
| 6. | Respiratory Syncytial Virus |
| 7. | Human Papillomavirus (HPV) |
| 8. | Herpes Simplex Virus (Shingles) |
| 9. | Varicella Zoster Virus (Chicken pox) |

List of Viruses with FDA-Approved Nucleic Acid Diagnostics (11):

| | |
|---|---|
| 1. | Adenovirus |
| 2. | Cytomegalovirus |
| 3. | Dengue |
| 4. | Enterovirus |
| 5. | Herpes Simplex Virus |
| 6. | Hepatitis B |
| 7. | Hepatitis C |
| 8. | Human Metapneumovirus |
| 9. | Human Papillomavirus |
| 10. | Influenza |
| 11. | Respiratory Syncytial Virus |

[0355] In certain embodiments, the virus is a drug resistant virus. By means of example, and without limitation, the virus may be a ribavirin resistant virus. Ribavirin is a very effective antiviral that hits a number of RNA viruses. Below are a few important viruses that have evolved ribavirin resistance. Foot and Mouth Disease Virus: doi:10.1128/JVI.03594-13. Polio virus: www.pnas.org/content/100/12/7289.full.pdf. Hepatitis C Virus: jvi.asm.org/content/79/4/2346.full. A number of other persistent RNA viruses, such as hepatitis and HIV, have evolved resistance to existing antiviral drugs. Hepatitis B Virus (lamivudine, tenofovir, entecavir): doi:10.1002/hep.22900. Hepatitis C Virus (Telaprevir, BILN2061, ITMN-191, SCH6, Boceprevir, AG-021541, ACH-806): doi:10.1002/hep.22549. HIV has many drug resistant mutations, see hivdb.stanford.edu/for more information. Aside from drug resistance, there are a number of clinically relevant mutations that could be targeted with the CRISPR systems according to the invention as described herein. For instance, persistent versus acute infection in LCMV: doi:10.1073/pnas.1019304108; or increased infectivity of Ebola: http://doi.org/10.1016/j.cell.2016.10.014 and http://doi.org/10.1016/j.cell.2016.10.013.

### Malaria Detection and Monitoring

[0356] Malaria is a mosquito-borne pathology caused by Plasmodium parasites. The parasites are spread to people through the bites of infected female Anopheles mosquitoes. Five Plasmodium species cause malaria in humans: Plasmodium falciparum, Plasmodium vivax, Plasmodium ovale, Plasmodium malariae, and Plasmodium knowlesi. Among them, according to the World Health Organization (WHO), Plasmodium falciparum: and Plasmodium vivax are responsible for the greatest threat. P. falciparum is the most prevalent malaria parasite on the African continent and is responsible for most malaria-related deaths globally. P. vivax is the dominant malaria parasite in most countries outside of sub-Saharan Africa.

[0357] In 2015, 91 countries and areas had ongoing malaria transmission. According to the latest WHO estimates, there were 212 million cases of malaria in 2015 and 429 000 deaths. In areas with high transmission of malaria, children under 5 are particularly susceptible to infection, illness and death; more than two thirds (70%) of all malaria deaths occur in this age group. Between 2010 and 2015, the under-5 malaria death rate fell by 29% globally. However malaria remains a major killer of children under five years old, taking the life of a child every two minutes.

[0358] As described by the WHO, malaria is an acute febrile illness. In a non-immune individual, symptoms appear 7 days or more after the infective mosquito bite. The first symptoms—fever, headache, chills and vomiting—may be mild and difficult to recognize as malaria, however, if not treated within 24 hours, P. falciparum malaria can progress to severe illness, often leading to death.

[0359] Children with severe malaria frequently develop one or more of the following symptoms: severe anaemia, respiratory distress in relation to metabolic acidosis, or cerebral malaria. In adults, multi-organ involvement is also frequent. In malaria endemic areas, people may develop partial immunity, allowing asymptomatic infections to occur.

[0360] The development of rapid and efficient diagnostic tests is of high relevance for public health. Indeed, early diagnosis and treatment of malaria not only reduces disease and prevents deaths but also contributes to reducing malaria transmission. According to the WHO recommendations, all cases of suspected malaria should be confirmed using parasite-based diagnostic testing (notably using a rapid diagnostic test) before administering treatment (see “WHO Guidelines for the treatment of malaria”, third edition, published in April 2015).

[0361] Resistance to antimalarial therapies represents a critical health problem which drastically reduces therapeutic strategies. Indeed, as reported on the WHO website, resistance of P. falciparum to previous generations of medicines, such as chloroquine and sulfadoxine/pyrimethamine (SP), became widespread in the 1950s and 1960s, undermining malaria control efforts and reversing gains in child survival. Thus, the WHO recommends the routine monitoring of antimalarial drug resistance. Indeed, accurate diagnostic may avoid non appropriate treatments and limit extension of resistance to antimalarial medicines.

[0362] In this context the WHO Global Technical Strategy for Malaria 2016-2030—adopted by the World Health Assembly in May 2015—provides a technical framework for all malaria-endemic countries. It is intended to guide and support regional and country programs as they work towards malaria control and elimination. The Strategy sets ambitious but achievable global targets, including:
[0363] Reducing malaria case incidence by at least 90% by 2030.
[0364] Reducing malaria mortality rates by at least 90% by 2030.
[0365] Eliminating malaria in at least 35 countries by 2030.
[0366] Preventing a resurgence of malaria in all countries that are malaria-free.

[0367] This Strategy was the result of an extensive consultative process that spanned 2 years and involved the participation of more than 400 technical experts from 70 Member States. It is based on 3 key axes:
[0368] ensuring universal access to malaria prevention, diagnosis and treatment;
[0369] accelerating efforts towards elimination and attainment of malaria-free status; and
[0370] transforming malaria surveillance into a core intervention.

[0371] Treatment against Plasmodium include aryl-amino alcohols such as quinine or quinine derivatives such as chloroquine, amodiaquine, mefloquine, piperaquine, lumefantrine, primaquine; lipophilic hydroxynaphthoquinone analog, such as atovaquone; antifolate drugs, such as the sulfa drugs sulfadoxine, dapsone and pyrimethamine; proguanil; the combination of atovaquone/proguanil; atemisins drugs; and combinations thereof.

[0372] Target sequences that are diagnostic for the presence of a mosquito-borne pathogen include sequence that diagnostic for the presence of Plasmodium, notably Plasmodia species affecting humans such as Plasmodium falciparum, Plasmodium vivax, Plasmodium ovale, Plasmodium malariae, and Plasmodium knowlesi, including sequences from the genomes thereof.

[0373] Target sequences that are diagnostic for monitoring drug resistance to treatment against Plasmodium, notably Plasmodia species affecting humans such as Plasmodium falciparum, Plasmodium vivax, Plasmodium ovale, Plasmodium malariae, and Plasmodium knowlesi.

[0374] Further target sequence include sequences include target molecules/nucleic acid molecules coding for proteins involved in essential biological process for the Plasmodium parasite and notably transporter proteins, such as protein from drug/metabolite transporter family, the ATP-binding cassette (ABC) protein involved in substrate translocation, such as the ABC transporter C subfamily or the Na+/H+ exchanger, membrane glutathione S-transferase; proteins involved in the folate pathway, such as the dihydropteroate synthase, the dihydrofolate reductase activity or the dihydrofolate reductase-thymidylate synthase; and proteins involved in the translocation of protons across the inner mitochondrial membrane and notably the cytochrome b complex. Additional target may also include the gene(s) coding for the heme polymerase.

[0375] Further target sequences include target molecules/nucleic acid molecules coding for proteins involved in essential biological process may be selected from the P. falciparum chloroquine resistance transporter gene (pfcrt), the P. falciparum multidrug resistance transporter 1 (pfmdr1), the P. falciparum multidrug resistance-associated protein gene (Pfmrp), the P. falciparum Na+/H+ exchanger gene (pfnhe), the gene coding for the P. falciparum exported protein 1, the P. falciparum Ca2+ transporting ATPase 6 (pfatp6); the P. falciparum dihydropteroate synthase (pfdhps), dihydrofolate reductase activity (pfdhpr) and dihydrofolate reductase-thymidylate synthase (pfdhfr) genes, the cytochrome b gene, gtp cyclohydrolase and the Kelch13 (K13) gene as well as their functional heterologous genes in other Plasmodium species.

[0376] A number of mutations, notably single point mutations, have been identified in the proteins which are the targets of the current treatments and associated with specific resistance phenotypes. Accordingly, the invention allows for the detection of various resistance phenotypes of mosquito-borne parasites, such as plasmodium.

[0377] The invention allows to detect one or more mutation(s) and notably one or more single nucleotide polymorphisms in target nucleic acids/molecules. Accordingly any one of the mutations below, or their combination thereof, can be used as drug resistance marker and can be detected according to the invention.

[0378] Single point mutations in P. falciparum K13 include the following single point mutations in positions 252, 441, 446, 449, 458, 493, 539, 543, 553, 561, 568, 574, 578, 580, 675, 476, 469, 481, 522, 537, 538, 579, 584 and 719 and notably mutations E252Q, P441L, F446I, G449A, N458Y, Y493H, R539T, I543T, P553L, R561H, V568G, P574L, A578S, C580Y, A675V, M476I; C469Y; A481V; S522C; N537I; N537D; G538V; M579I; D584V; and H719N. These mutations are generally associated with artemisins drugs resistance phenotypes (Artemisinin and artemisinin-based combination therapy resistance, April 2016 WHO/HTM/GMP/2016.5).

[0379] In the P. falciparum dihydrofolate reductase (DHFR) (PfDHFR-TS, PFD0830w), important polymorphisms include mutations in positions 108, 51, 59 and 164, notably 108 D, 164L, 511 and 59R which modulate resistance to pyrimethamine. Other polymorphisms also include 437G, 581G, 540E, 436A and 613S which are associated with resistance to sulfadoxine. Additional observed mutations include Ser108Asn, Asn51Ile, Cys59Arg, Ile164Leu, Cys50Arg, Ile164Leu, Asn188Lys, Ser189Arg and Val213Ala, Ser108Thr and Ala16Val. Mutations Ser108Asn, Asn51Ile, Cys59Arg, Ile164Leu, Cys50Arg, Ile164Leu are notably associated with pyrimethamine based therapy and/or chloroguanine-dapsone combination therapy resistances. Cycloguanil resistance appears to be associated with the double mutations Ser108Thr and Ala16Val. Amplification of dhfr may also be of high relevance for therapy resistance notably pyrimethamine resistance

[0380] In the P. falciparum dihydropteroate synthase (DHPS) (PfDHPS, PF08_0095), important polymorphisms include mutations in positions 436, 437, 581 and 613 Ser436Ala/Phe, Ala437Gly, Lys540Glu, Ala581Gly and Ala613Thr/Ser. Polymorphism in position 581 and/or 613 have also been associated with resistance to sulfadoxine-pyrimethamine base therapies.

[0381] In the P. falciparum chloroquine-resistance transporter (PfCRT), polymorphism in position 76, notably the mutation Lys76Thr, is associated with resistance to chloroquine. Further polymorphisms include Cys72Ser, Met74Ile, Asn75Glu, Ala220Ser, Gln271Glu, Asn326Ser, Ile356Thr and Arg371Ile which may be associated with chloroquine resistance. PfCRT is also phosphorylated at the residues S33, S411 and T416, which may regulate the transport activity or specificity of the protein.

[0382] In the P. falciparum multidrug-resistance transporter 1 (PfMDR1) (PFE1150w), polymorphisms in positions 86, 184, 1034, 1042, notably Asn86Tyr, Tyr184-Phe, Ser1034Cys, Asn1042Asp and Asp1246Tyr have been identified and reported to influence have been reported to influence susceptibilities to lumefantrine, artemisinin, quinine, mefloquine, halofantrine and chloroquine. Additionally, amplification of PfMIDR1 is associated with reduced susceptibility to lumefantrine, artemisinin, quinine, mefloquine, and halofantrine and deamplification of PfMDR1 leads to an increase in chloroquine resistance. Amplification of pfmdr1 may also be detected. The phosphorylation status of PfMDR1 is also of high relevance.

[0383] In the P. falciparum multidrug-resistance associated protein (PfMRP) (gene reference PFA0590w), polymorphisms in positions 191 and/or 437, such as Y191H and A437S have been identified and associated with chloroquine resistance phenotypes.

[0384] In the P. falciparum NA+/H+ enchanger (PfNHE) (ref PF13_0019), increased repetition of the DNNND in microsatellite ms4670 may be a marker for quinine resistance.

[0385] Mutations altering the ubiquinol binding site of the cytochrome b protein encoded by the cytochrome be gene (cytb, mal_mito_3) are associated with atovaquone resistance. Mutations in positions 26, 268, 276, 133 and 280 and notably Tyr26Asn, Tyr268Ser, M1331 and G280D may be associated with atovaquone resistance.

[0386] For example in P vivax, mutations in PvMDR1, the homolog of Pf MDR1 have been associated with chloroquine resistance, notably polymorphism in position 976 such as the mutation Y976F.

[0387] The above mutations are defined in terms of protein sequences. However, the skilled person is able to determine the corresponding mutations, including SNPS, to be identified as a nucleic acid target sequence.

[0388] Other identified drug-resistance markers are known in the art, for example as described in “Susceptibility of Plasmodium falciparum to antimalarial drugs (1996-2004)”; WHO; Artemisinin and artemisinin-based combination therapy resistance (April 2016 WHO/HTMIGMP/2016.5); “Drug-resistant malaria: molecular mechanisms and implications for public health” FEBS Lett. 2011 Jun. 6; 585(11):1551-62. doi:10.1016/j.febslet.2011.04.042. Epub 2011 Apr. 23. Review. PubMed PMID: 21530510; the contents of which are herewith incorporated by reference

[0389] As to polypeptides that may be detected in accordance with the present invention, gene products of all genes mentioned herein may be used as targets. Correspondingly, it is contemplated that such polypeptides could be used for species identification, typing and/or detection of drug resistance.

[0390] In certain example embodiments, the systems, devices, and methods, disclosed herein are directed to detecting the presence of one or more mosquito-borne parasite in a sample, such as a biological sample obtained from a subject. In certain example embodiments, the parasite may be selected from the species Plasmodium falciparum, Plasmodium vivax, Plasmodium ovale, Plasmodium malariae or Plasmodium knowlesi. Accordingly, the methods disclosed herein can be adapted for use in other methods (or in combination) with other methods that require quick identification of parasite species, monitoring the presence of parasites and parasite forms (for example corresponding to various stages of infection and parasite life-cycle, such as exo-erythrocytic cycle, erythrocytic cycle, sporpogonic cycle; parasite forms include merozoites, sporozoites, schizonts, gametocytes); detection of certain phenotypes (e.g. pathogen drug resistance), monitoring of disease progression and/or outbreak, and treatment (drug) screening. Further, in the case of malaria, a long time may elapse following the infective bite, namely a long incubation period, during which the patient does not show symptoms. Similarly, prophylactic treatments can delay the appearance of symptoms, and long asymptomatic periods can also be observed before a relapse. Such delays can easily cause misdiagnosis or delayed diagnosis, and thus impair the effectiveness of treatment.

[0391] Because of the rapid and sensitive diagnostic capabilities of the embodiments disclosed here, detection of parasite type, down to a single nucleotide difference, and the ability to be deployed as a POC device, the embodiments disclosed herein may be used guide therapeutic regimens, such as selection of the appropriate course of treatment. The embodiments disclosed herein may also be used to screen environmental samples (mosquito population, etc.) for the presence and the typing of the parasite. The embodiments may also be modified to detect mosquito-borne parasistes and other mosquito-borne pathogens simulataneously. In some instances, malaria and other mosquito-borne pathogens may present initially with similar symptoms. Thus, the ability to quickly distinguish the type of infection can guide important treatment decisions. Other mosquito-born pathogens that may be detected in conjunction with malair include dengue, West Nile virus, chikungunya, yellow fever, filariasis, Japanese encephalitis, Saint Louis encephalitis, western equine encephalitis, eastern equine encephalitis, Venezuelan equine encephalitits, La Crosse encephalitis, and zika.

[0392] In certain example embodiments, the devices, systems, and methods disclosed herein may be used to distinguish multiple mosquito-borne parasite species in a sample. In certain example embodiments, identification may be based on ribosomal RNA sequences, including the 18S, 16S, 23S, and 5S subunits. In certain example embodiments, identification may be based on sequences of genes that are present in multiple copies in the genome, such as mitochondrial genes like CYTB. In certain example embodiments, identification may be based on sequences of genes that are highly expressed and/or highly conserved such as GAPDH, Histone H2B, enolase, or LDH. Methods for identifying relevant rRNA sequences are disclosed in U.S. Patent Application Publication No. 2017/0029872. In certain example embodiments, a set of guide RNA may be designed to distinguish each species by a variable region that is unique to each species or strain. Guide RNAs may also be designed to target RNA genes that distinguish microbes at the genus, family, order, class, phylum, kingdom levels, or a combination thereof. In certain example embodiments where amplification is used, a set of amplification primers may be designed to flanking constant regions of the ribosomal RNA sequence and a guide RNA designed to distinguish each species by a variable internal region. In certain example embodiments, the primers and guide RNAs may be designed to conserved and variable regions in the 16S subunit respectfully. Other genes or genomic regions that uniquely variable across species or a subset of species such as the RecA gene family, RNA polymerase 3 subunit, may be used as well. Other suitable phylogenetic markers, and methods for identifying the same, are discussed for example in Wu et al. arXiv: 1307.8690 [q-bio.GN].

[0393] In certain example embodiments, species identification can be performed based on genes that are present in multiple copies in the genome, such as mitochondrial genes like CYTB. In certain example embodiments, species identification can be performed based on highly expressed and/or highly conserved genes such as GAPDH, Histone H2B, enolase, or LDH.

[0394] In certain example embodiments, a method or diagnostic is designed to screen mosquito-borne parasites across multiple phylogenetic and/or phenotypic levels at the same time. For example, the method or diagnostic may comprise the use of multiple CRISPR systems with different guide RNAs. A first set of guide RNAs may distinguish, for example, between Plasmodium falciparum or Plasmodium vivax. These general classes can be even further subdivided. For example, guide RNAs could be designed and used in the method or diagnostic that distinguish drug-resistant strains, in general or with respect to a specific drug or combination of drugs. A second set of guide RNA can be designed to distinguish microbes at the species level. Thus, a matrix may be produced identifying all mosquito-borne parasites species or subspecies, further divided according to drug resistance. The foregoing is for example purposes only. Other means for classifying other types of mosquito-borne parasites are also contemplated and would follow the general structure described above.

[0395] In certain example embodiments, the devices, systems and methods disclosed herein may be used to screen for mosquito-borne parasite genes of interest, for example drug resistance genes. Guide RNAs may be designed to distinguish between known genes of interest. Samples, including clinical samples, may then be screened using the embodiments disclosed herein for detection of one or more such genes. The ability to screen for drug resistance at POC would have tremendous benefit in selecting an appropriate treatment regime. In certain example embodiments, the drug resistance genes are genes encoding proteins such as transporter proteins, such as protein from drug/metabolite transporter family, the ATP-binding cassette (ABC) protein involved in substrate translocation, such as the ABC transporter C subfamily or the Na+/H+ exchanger; proteins involved in the folate pathway, such as the dihydropteroate synthase, the dihydrofolate reductase activity or the dihydrofolate reductase-thymidylate synthase; and proteins involved in the translocation of protons across the inner mitochondrial membrane and notably the cytochrome b complex. Additional targets may also include the gene(s) coding for the heme polymerase. In certain example embodiments, the drug resistance genes are selected from the P. falciparum chloroquine resistance transporter gene (pfcrt), the P. falciparum multidrug resistance transporter 1 (pfmdr1), the P. falciparum multidrug resistance-associated protein gene (Pfmrp), the P. falciparum Na+/H+ exchanger gene (pfnhe), the P. falciparum Ca2+ transporting ATPase 6 (pfatp6), the P. falciparum dihydropteroate synthase (pfdhps), dihydrofolate reductase activity (pfdhpr) and dihydrofolate reductase-thymidylate synthase (pfdhfr) genes, the cytochrome b gene, gtp cyclohydrolase and the Kelchl3 (K13) gene as well as their functional heterologous genes in other Plasmodium species. Other identified drug-resistance markers are known in the art, for example as described in “Susceptibility of Plasmodium falciparum to antimalarial drugs (1996-2004)”; WHO; Artemisinin and artemisinin-based combination therapy resistance (April 2016 WHO/HTMIGMP/2016.5); “Drug-resistant malaria: molecular mechanisms and implications for public health” FEBS Lett. 2011 Jun. 6; 585(11):1551-62. doi:10.1016/j.febslet.2011.04.042. Epub 2011 Apr. 23. Review. PubMed PMID: 21530510; the contents of which are herewith incorporated by reference.

[0396] In some embodiments, a CRISPR system, detection system or methods of use thereof as described herein may be used to determine the evolution of a mosquito-borne parasite outbreak. The method may comprise detecting one or more target sequences from a plurality of samples from one or more subjects, wherein the target sequence is a sequence from a mosquito-borne parasite spreading or causing the outbreaks. Such a method may further comprise determining a pattern of mosquito-borne parasite transmission, or a mechanism involved in a disease outbreak caused by a mosquito-borne parasite. The samples may be derived from one or more humans, and/or be derived from one or more mosquitoes.

[0397] The pattern of pathogen transmission may comprise continued new transmissions from the natural reservoir of the mosquito-borne parasite or other transmissions (e.g. across mosquitoes) following a single transmission from the natural reservoir or a mixture of both. In one embodiment, the target sequence is preferably a sequence within the mosquito-borne parasite genome or fragments thereof. In one embodiment, the pattern of the mosquito-borne parasite transmission is the early pattern of the mosquito-borne parasite transmission, i.e. at the beginning of the mosquito-borne parasite outbreak. Determining the pattern of the mosquito-borne parasite transmission at the beginning of the outbreak increases likelihood of stopping the outbreak at the earliest possible time thereby reducing the possibility of local and international dissemination.

[0398] Determining the pattern of the mosquito-borne parasite transmission may comprise detecting a mosquito-borne parasite sequence according to the methods described herein. Determining the pattern of the pathogen transmission may further comprise detecting shared intra-host variations of the mosquito-borne parasite sequence between the subjects and determining whether the shared intra-host variations show temporal patterns. Patterns in observed intrahost and interhost variation provide important insight about transmission and epidemiology (Gire, et al., 2014).

[0399] In addition to other sample types disclosed herein, the the sample may be derived from one or more mosquitoes, for example the sample may comprise mosquito saliva.

### Biomarker Detection

[0400] In certain example embodiments, the systems, devices, and methods disclosed herein may be used for biomarker detection. For example, the systems, devices and method disclosed herein may be used for SNP detection and/or genotyping. The systems, devices and methods disclosed herein may be also used for the detection of any disease state or disorder characterized by aberrant gene expression. Aberrant gene expression includes aberration in the gene expressed, location of expression and level of expression. Multiple transcripts or protein markers related to cardiovascular, immune disorders, and cancer among other diseases may be detected. In certain example embodiments, the embodiments disclosed herein may be used for cell free DNA detection of diseases that involve lysis, such as liver fibrosis and restrictive/obstructive lung disease. In certain example embodiments, the embodiments could be utilized for faster and more portable detection for pre-natal testing of cell-free DNA. The embodiments disclosed herein may be used for screening panels of different SNPs associated with, among others, cardiovascular health, lipid/metabolic signatures, ethnicity identification, paternity matching, human ID (e.g. matching suspect to a criminal database of SNP signatures). The embodiments disclosed herein may also be used for cell free DNA detection of mutations related to and released from cancer tumors. The embodiments disclosed herein may also be used for detection of meat quality, for example, by providing rapid detection of different animal sources in a given meat product. Embodiments disclosed herein may also be used for the detection of GMOs or gene editing related to DNA. As described herein elsewhere, closely related genotypes/alleles or biomarkers (e.g. having only a single nucleotide difference in a given target sequence) may be distinguished by introduction of a synthetic mismatch in the gRNA.

[0401] In an aspect, the invention relates to a method for detecting target nucleic acids in samples, comprising:

[0402] distributing a sample or set of samples into one or more individual discrete volumes, the individual discrete volumes comprising a CRISPR system according to the invention as described herein;

[0403] incubating the sample or set of samples under conditions sufficient to allow binding of the one or more guide RNAs to one or more target molecules;

[0404] activating the CRISPR effector protein via binding of the one or more guide RNAs to the one or more target molecules, wherein activating the CRISPR effector protein results in modification of the RNA-based masking construct such that a detectable positive signal is generated; and

[0405] detecting the detectable positive signal, wherein detection of the detectable positive signal indicates a presence of one or more target molecules in the sample.

### Biomarker Sample Types

[0406] The sensitivity of the assays described herein are well suited for detection of target nucleic acids in a wide variety of biological sample types, including sample types in which the target nucleic acid is dilute or for which sample material is limited. Biomarker screening may be carried out on a number of sample types including, but not limited to, saliva, urine, blood, feces, sputum, and cerebrospinal fluid. The embodiments disclosed herein may also be used to detect up- and/or down-regulation of genes. For example, a s sample may be serially diluted such that only over-expressed genes remain above the detection limit threshold of the assay.

[0407] In certain embodiments, the present invention provides steps of obtaining a sample of biological fluid (e.g., urine, blood plasma or serum, sputum, cerebral spinal fluid), and extracting the DNA. The mutant nucleotide sequence to be detected, may be a fraction of a larger molecule or can be present initially as a discrete molecule.

[0408] In certain embodiments, DNA is isolated from plasma/serum of a cancer patient. For comparison, DNA samples isolated from neoplastic tissue and a second sample may be isolated from non-neoplastic tissue from the same patient (control), for example, lymphocytes. The non-neoplastic tissue can be of the same type as the neoplastic tissue or from a different organ source. In certain embodiments, blood samples are collected and plasma immediately separated from the blood cells by centrifugation. Serum may be filtered and stored frozen until DNA extraction.

[0409] In certain example embodiments, target nucleic acids are detected directly from a crude or unprocessed sample sample, such as blood, serum, saliva, cebrospinal fluid, sputum, or urine. In certain example embodiments, the target nucleic acid is cell free DNA.

### Circulating Tumor Cells

[0410] In one embodiment, circulating cells (e.g., circulating tumor cells (CTC)) can be assayed with the present invention. Isolation of circulating tumor cells (CTC) for use in any of the methods described herein may be performed. Exemplary technologies that achieve specific and sensitive detection and capture of circulating cells that may be used in the present invention have been described (Mostert B, et al., Circulating tumor cells (CTCs): detection methods and their clinical relevance in breast cancer. Cancer Treat Rev. 2009; 35:463-474; and Talasaz A H, et al., Isolating highly enriched populations of circulating epithelial cells and other rare cells from blood using a magnetic sweeper device. Proc Natl Acad Sci USA. 2009; 106:3970-3975). As few as one CTC may be found in the background of 105-106 peripheral blood mononuclear cells (Ross A A, et al., Detection and viability of tumor cells in peripheral blood stem cell collections from breast cancer patients using immunocytochemical and clonogenic assay techniques. Blood. 1993, 82:2605-2610). The CellSearch® platform uses immunomagnetic beads coated with antibodies to Epithelial Cell Adhesion Molecule (EpCAM) to enrich for EPCAM-expressing epithelial cells, followed by immunostaining to confirm the presence of cytokeratin staining and absence of the leukocyte marker CD45 to confirm that captured cells are epithelial tumor cells (Momburg F, et al., Immunohistochemical study of the expression of a Mr 34,000 human epithelium-specific surface glycoprotein in normal and malignant tissues. Cancer Res. 1987; 47:2883-2891; and Allard W J, et al., Tumor cells circulate in the peripheral blood of all major carcinomas but not in healthy subjects or patients with nonmalignant diseases. Clin Cancer Res. 2004; 10:6897-6904). The number of cells captured have been prospectively demonstrated to have prognostic significance for breast, colorectal and prostate cancer patients with advanced disease (Cohen S J, et al., J Clin Oncol. 2008; 26:3213-3221; Cristofanilli M, et al. N Engl J Med. 2004; 351:781-791; Cristofanilli M, et al., J Clin Oncol. 2005; 23: 1420-1430; and de Bono J S, et al. Clin Cancer Res. 2008; 14:6302-6309).

[0411] The present invention also provides for isolating CTCs with CTC-Chip Technology. CTC-Chip is a microfluidic based CTC capture device where blood flows through a chamber containing thousands of microposts coated with anti-EpCAM antibodies to which the CTCs bind (Nagrath S, et al. Isolation of rare circulating tumour cells in cancer patients by microchip technology. Nature. 2007; 450: 1235-1239). CTC-Chip provides a significant increase in CTC counts and purity in comparison to the CellSearch® system (Maheswaran S, et al. Detection of mutations in EGFR in circulating lung-cancer cells, N Engl J Med. 2008; 359:366-377), both platforms may be used for downstream molecular analysis.

### Cell-Free Chromatin

[0412] In certain embodiments, cell free chromatin fragments are isolated and analyzed according to the present invention. Nucleosomes can be detected in the serum of healthy individuals (Stroun et al., Annals of the New York Academy of Sciences 906: 161-168 (2000)) as well as individuals afflicted with a disease state. Moreover, the serum concentration of nucleosomes is considerably higher in patients suffering from benign and malignant diseases, such as cancer and autoimmune disease (Holdenrieder et al (2001) Int J Cancer 95, 114-120, Trejo-Becerril et al (2003) Int J Cancer 104, 663-668; Kuroi et al 1999 Breast Cancer 6, 361-364; Kuroi et al (2001) Intj Oncology 19, 143-148; Amoura et al (1997) Arth Rheum 40, 2217-2225; Williams et al (2001) J Rheumatol 28, 81-94). Not being bound by a theory, the high concentration of nucleosomes in tumor bearing patients derives from apoptosis, which occurs spontaneously in proliferating tumors. Nucleosomes circulating in the blood contain uniquely modified histones. For example, U.S. Patent Publication No. 2005/0069931 (Mar. 31, 2005) relates to the use of antibodies directed against specific histone N-terminus modifications as diagnostic indicators of disease, employing such histone-specific antibodies to isolate nucleosomes from a blood or serum sample of a patient to facilitate purification and analysis of the accompanying DNA for diagnostic/screening purposes. Accordingly, the present invention may use chromatin bound DNA to detect and monitor, for example, tumor mutations. The identification of the DNA associated with modified histones can serve as diagnostic markers of disease and congenital defects.

[0413] Thus, in another embodiment, isolated chromatin fragments are derived from circulating chromatin, preferably circulating mono and oligonucleosomes. Isolated chromatin fragments may be derived from a biological sample. The biological sample may be from a subject or a patient in need thereof. The biological sample may be sera, plasma, lymph, blood, blood fractions, urine, synovial fluid, spinal fluid, saliva, circulating tumor cells or mucous.

Cell-Free DNA (cfDNA)

[0414] In certain embodiments, the present invention may be used to detect cell free DNA (cfDNA). Cell free DNA in plasma or serum may be used as a non-invasive diagnostic tool. For example, cell free fetal DNA has been studied and optimized for testing on-compatible RhD factors, sex determination for X-linked genetic disorders, testing for single gene disorders, indentificaiton of preeclampsia. For example, sequencing the fetal cell fraction of cfDNA in maternal plasma is a reliable approach for detecting copy number changes associated with fetal chromosome aneuploidy. For another example, cfDNA isolated from cancer patients has been used to detect mutations in key genes relevant for treatment decisions.

[0415] In certain example embodiments, the present disclosure provides detecting cfDNA directly from a patient sample. In certain other example embodiment, the present disclosure provides enriching cfDNA using the enrichment embodiments disclosed above and prior to detecting the target cfDNA.

### Exosomes

[0416] In one embodiment, exosomes can be assayed with the present invention. Exosomes are small extracellular vesicles that have been shown to contain RNA. Isolation of exosomes by ultracentrifugation, filtration, chemical precipitation, size exclusion chromatography, and microfluidics are known in the art. In one embodiment exosomes are purified using an exosome biomarker. Isolation and purification of exosomes from biological samples may be performed by any known methods (see e.g., WO2016172598A1).

### SNP Detection and Genotyping

[0417] In certain embodiments, the present invention may be used to detect the presence of single nucleotide polymorphisms (SNP) in a biological sample. The SNPs may be related to maternity testing (e.g., sex determination, fetal defects). They may be related to a criminal investigation. In one embodiment, a suspect in a criminal investigation may be identified by the present invention. Not being bound by a theory nucleic acid based forensic evidence may require the most sensitive assay available to detect a suspect or victim's genetic material because the samples tested may be limiting.

[0418] In other embodiments, SNPs associated with a disease are encompassed by the present invention. SNPs associated with diseases are well known in the art and one skilled in the art can apply the methods of the present invention to design suitable guide RNAs (see e.g., www.ncbi.nlm.nih.gov/clinvar?term=human%5Borgn%5D).

[0419] In an aspect, the invention relates to a method for genotyping, such as SNP genotyping, comprising:

[0420] distributing a sample or set of samples into one or more individual discrete volumes, the individual discrete volumes comprising a CRISPR system according to the invention as described herein;

[0421] incubating the sample or set of samples under conditions sufficient to allow binding of the one or more guide RNAs to one or more target molecules;

[0422] activating the CRISPR effector protein via binding of the one or more guide RNAs to the one or more target molecules, wherein activating the CRISPR effector protein results in modification of the RNA-based masking construct such that a detectable positive signal is generated; and

[0423] detecting the detectable positive signal, wherein detection of the detectable positive signal indicates a presence of one or more target molecules characteristic for a particular genotype in the sample.

[0424] In certain embodiments, the detectable signal is compared to (e.g. by comparison of signal intensity) one or more standard signal, preferably a synthetic standard signal, such as for instance illustrated in an embodiment in FIG. 60. In certain embodiments, the standard is or corresponds to a particular genotype. In certain embodiments, the standard comprises a particular SNP or other (single) nucleotide variation. In certain embodiments, the standard is a (PCR-amplified) genotype standard. In certain embodiments, the standard is or comprises DNA. In certain embodiments, the standard is or comprises RNA. In certain embodiments, the standard is or comprised RNA which is transcribed from DNA. In certain embodiments, the standard is or comprises DNA which is reverse transcribed from RNA. In certain embodiments, the detectable signal is compared to one or more standard, each of which corresponds to a known genotype, such as a SNP or other (single) nucleotide variation. In certain embodiments, the detectable signal is compared to one or more standard signal and the comparison comprises statistical analysis, such as by parametric or non-parametric statistical analysis, such as by one- or two-way ANOVA, etc. In certain embodiments, the detectable signal is compared to one or more standard signal and when the detectable signal does not (statistically) significantly deviate from the standard, the genotype is determined as the genotype corresponding to said standard.

[0425] In other embodiments, the present invention allows rapid genotyping for emergency pharmacogenomics. In one embodiment, a single point of care assay may be used to genotype a patient brought in to the emergency room. The patient may be suspected of having a blood clot and an emergency physician needs to decide a dosage of blood thinner to administer. In exemplary embodiments, the present invention may provide guidance for administration of blood thinners during myocardial infarction or stroke treatment based on genotyping of markers such as VKORC1, CYP2C9, and CYP2C19. In one embodiment, the blood thinner is the anticoagulant warfarin (Holford, N H (December 1986). “Clinical Pharmacokinetics and Pharmacodynamics of Warfarin Understanding the Dose-Effect Relationship”. Clinical Pharmacokinetics. Springer International Publishing. 11 (6): 483-504). Genes associated with blood clotting are known in the art (see e.g., US20060166239A1; Litin S C, Gastineau D A (1995) “Current concepts in anticoagulant therapy”. Mayo Clin. Proc. 70 (3): 266-72; and Rusdiana et al., Responsiveness to low-dose warfarin associated with genetic variants of VKORC1, CYP2C9, CYP2C19, and CYP4F2 in an Indonesian population. Eur J Clin Pharmacol. 2013 March; 69(3):395-405). Specifically, in the VKORC1 1639 (or 3673) single-nucleotide polymorphism, the common (“wild-type”) G allele is replaced by the A allele. People with an A allele (or the “A haplotype”) produce less VKORC1 than do those with the G allele (or the “non-A haplotype”). The prevalence of these variants also varies by race, with 37% of Caucasians and 14% of Africans carrying the A allele. The end result is a decreased number of clotting factors and therefore, a decreased ability to clot.

[0426] In certain example embodiments, the availability of genetic material for detecting a SNP in a patient allows for detecting SNPs without amplification of a DNA or RNA sample. In the case of genotyping, the biological sample tested is easily obtained. In certain example embodiments, the incubation time of the present invention may be shortened. The assay may be performed in a period of time required for an enzymatic reaction to occur. One skilled in the art can perform biochemical reactions in 5 minutes (e.g., 5 minute ligation). The present invention may use an automated DNA extraction device to obtain DNA from blood. The DNA can then be added to a reaction that generates a target molecule for the effector protein. Immediately upon generating the target molecule the masking agent can be cut and a signal detected. In exemplary embodiments, the present invention allows a POC rapid diagnostic for determining a genotype before administering a drug (e.g., blood thinner). In the case where an amplification step is used, all of the reactions occur in the same reaction in a one step process. In preferred embodiments, the POC assay may be performed in less than an hour, preferably 10 minutes, 20 minutes, 30 minutes, 40 minutes, or 50 minutes.

[0427] In certain embodiments, the systems, devices, and methods disclosed herein may be used for detecting the presence or expression level of long non-coding RNAs (lncRNAs). Expression of certain lncRNAs are associated with disease state and/or drug resistance. In particular, certain lncRNAs (e.g., TCONS_00011252, NR_034078, TCONS_00010506, TCONS_00026344, TCONS_00015940, TCONS_00028298, TCONS 00026380, TCONS 0009861, TCONS 00026521, TCONS 00016127, NR 125939, NR_033834, TCONS_00021026, TCONS_00006579, NR_109890, and NR_026873) are associated with resistance to cancer treatment, such as resistance to one or more BRAF inhibitors (e.g., Vemurafenib, Dabrafenib, Sorafenib, GDC-0879, PLX-4720, and LGX818) for treating melanoma (e.g., nodular melanoma, lentigo maligna, lentigo maligna melanoma, acral lentiginous melanoma, superficial spreading melanoma, mucosal melanoma, polypoid melanoma, desmoplastic melanoma, amelanotic melanoma, and soft-tissue melanoma). The detection of lncRNAs using the various embodiments described herein can facilitate disease diagnosis and/or selection of treatment options.

[0428] In one embodiment, the present invention can guide DNA- or RNA-targeted therapies (e.g., CRISPR, TALE, Zinc finger proteins, RNAi), particularly in settings where rapid administration of therapy is important to treatment outcomes.

### LOH Detection

[0429] Cancer cells undergo a loss of genetic material (DNA) when compared to normal cells. This deletion of genetic material which almost all, if not all, cancers undergo is referred to as “loss of heterozygosity” (LOH). Loss of heterozygosity (LOH) is a gross chromosomal event that results in loss of the entire gene and the surrounding chromosomal region. The loss of heterozygosity is a common occurrence in cancer, where it can indicate the absence of a functional tumor suppressor gene in the lost region. However, a loss may be silent because there still is one functional gene left on the other chromosome of the chromosome pair. The remaining copy of the tumor suppressor gene can be inactivated by a point mutation, leading to loss of a tumor suppressor gene. The loss of genetic material from cancer cells can result in the selective loss of one of two or more alleles of a gene vital for cell viability or cell growth at a particular locus on the chromosome.

[0430] An “LOH marker” is DNA from a microsatellite locus, a deletion, alteration, or amplification in which, when compared to normal cells, is associated with cancer or other diseases. An LOH marker often is associated with loss of a tumor suppressor gene or another, usually tumor related, gene.

[0431] The term “microsatellites” refers to short repetitive sequences of DNA that are widely distributed in the human genome. A microsatellite is a tract of tandemly repeated (i.e. adjacent) DNA motifs that range in length from two to five nucleotides, and are typically repeated 5-50 times. For example, the sequence TATATATATA (SEQ. ID. No. 418) is a dinucleotide microsatellite, and GTCGTCGTCGTCGTC (SEQ. ID. No. 419) is a trinucleotide microsatellite (with A being Adenine, G Guanine, C Cytosine, and T Thymine). Somatic alterations in the repeat length of such microsatellites have been shown to represent a characteristic feature of tumors. Guide RNAs may be designed to detect such microsatellites. Furthermore, the present invention may be used to detect alterations in repeat length, as well as amplifications and deletions based upon quantitation of the detectable signal. Certain microsatellites are located in regulatory flanking or intronic regions of genes, or directly in codons of genes. Microsatellite mutations in such cases can lead to phenotypic changes and diseases, notably in triplet expansion diseases such as fragile X syndrome and Huntington's disease.

[0432] Frequent loss of heterozygosity (LOH) on specific chromosomal regions has been reported in many kinds of malignancies. Allelic losses on specific chromosomal regions are the most common genetic alterations observed in a variety of malignancies, thus microsatellite analysis has been applied to detect DNA of cancer cells in specimens from body fluids, such as sputum for lung cancer and urine for bladder cancer. (Rouleau, et al. Nature 363, 515-521 (1993); and Latif, et al. Science 260, 1317-1320 (1993)). Moreover, it has been established that markedly increased concentrations of soluble DNA are present in plasma of individuals with cancer and some other diseases, indicating that cell free serum or plasma can be used for detecting cancer DNA with microsatellite abnormalities. (Kamp, et al. Science 264, 436-440 (1994); and Steck, et al. Nat Genet. 15(4), 356-362 (1997)). Two groups have reported microsatellite alterations in plasma or serum of a limited number of patients with small cell lung cancer or head and neck cancer. (Hahn, et al. Science 271, 350-353 (1996); and Miozzo, et al. Cancer Res. 56, 2285-2288 (1996)). Detection of loss of heterozygosity in tumors and serum of melanoma patients has also been previously shown (see, e.g., United States patent number U.S. Pat. No. 6,465,177B1).

[0433] Thus, it is advantageous to detect of LOH markers in a subject suffering from or at risk of cancer. The present invention may be used to detect LOH in tumor cells. In one embodiment, circulating tumor cells may be used as a biological sample. In preferred embodiments, cell free DNA obtained from serum or plasma is used to noninvasively detect and/or monitor LOH. In other embodiments, the biological sample may be any sample described herein (e.g., a urine sample for bladder cancer). Not being bound by a theory, the present invention may be used to detect LOH markers with improved sensitivity as compared to any prior method, thus providing early detection of mutational events. In one embodiment, LOH is detected in biological fluids, wherein the presence of LOH is associated with the occurrence of cancer. The method and systems described herein represents a significant advance over prior techniques, such as PCR or tissue biopsy by providing a non-invasive, rapid, and accurate method for detecting LOH of specific alleles associated with cancer. Thus, the present invention provides a methods and systems which can be used to screen high-risk populations and to monitor high risk patients undergoing chemoprevention, chemotherapy, immunotherapy or other treatments.

[0434] Because the method of the present invention requires only DNA extraction from bodily fluid such as blood, it can be performed at any time and repeatedly on a single patient. Blood can be taken and monitored for LOH before or after surgery; before, during, and after treatment, such as chemotherapy, radiation therapy, gene therapy or immunotherapy; or during follow-up examination after treatment for disease progression, stability, or recurrence. Not being bound by a theory, the method of the present invention also may be used to detect subclinical disease presence or recurrence with an LOH marker specific for that patient since LOH markers are specific to an individual patient's tumor. The method also can detect if multiple metastases may be present using tumor specific LOH markers.

### Detection of Epigenetic Modifications

[0435] Histone variants, DNA modifications, and histone modifications indicative of cancer or cancer progression may be used in the present invention. For example, U.S. patent publication 20140206014 describes that cancer samples had elevated nucleosome H2AZ, macroH2A1.1, 5-methylcytosine, P-H2AX(Ser139) levels as compared to healthy subjects. The presence of cancer cells in an individual may generate a higher level of cell free nucleosomes in the blood as a result of the increased apoptosis of the cancer cells. In one embodiment, an antibody directed against marks associated with apoptosis, such as H2B Ser 14(P), may be used to identify single nucleosomes that have been released from apoptotic neoplastic cells. Thus, DNA arising from tumor cells may be advantageously analyzed according to the present invention with high sensitivity and accuracy.

### Pre-Natal Screening

[0436] In certain embodiments, the method and systems of the present invention may be used in prenatal screening. In certain embodiments, cell-free DNA is used in a method of prenatal screening. In certain embodiments, DNA associated with single nucleosomes or oligonucleosomes may be detected with the present invention. In preferred embodiments, detection of DNA associated with single nucleosomes or oligonucleosomes is used for prenatal screening. In certain embodiments, cell-free chromatin fragments are used in a method of prenatal screening.

[0437] Prenatal diagnosis or prenatal screening refers to testing for diseases or conditions in a fetus or embryo before it is born. The aim is to detect birth defects such as neural tube defects, Down syndrome, chromosome abnormalities, genetic disorders and other conditions, such as spina bifida, cleft palate, Tay Sachs disease, sickle cell anemia, thalassemia, cystic fibrosis, Muscular dystrophy, and fragile X syndrome. Screening can also be used for prenatal sex discernment. Common testing procedures include amniocentesis, ultrasonography including nuchal translucency ultrasound, serum marker testing, or genetic screening. In some cases, the tests are administered to determine if the fetus will be aborted, though physicians and patients also find it useful to diagnose high-risk pregnancies early so that delivery can be scheduled in a tertian, care hospital where the baby can receive appropriate care.

[0438] It has been realized that there are fetal cells which are present in the mother's blood, and that these cells present a potential source of fetal chromosomes for prenatal DNA-based diagnostics. Additionally, fetal DNA ranges from about 2-10% of the total DNA in maternal blood. Currently available prenatal genetic tests usually involve invasive procedures. For example, chorionic villus sampling (CVS) performed on a pregnant woman around 10-12 weeks into the pregnancy and amniocentesis performed at around 14-16 weeks all contain invasive procedures to obtain the sample for testing chromosomal abnormalities in a fetus. Fetal cells obtained via these sampling procedures are usually tested for chromosomal abnormalities using cytogenetic or fluorescent in situ hybridization (FISH) analyses. Cell-free fetal DNA has been shown to exist in plasma and serum of pregnant women as early as the sixth week of gestation, with concentrations rising during pregnancy and peaking prior to parturition. Because these cells appear very early in the pregnancy, they could form the basis of an accurate, noninvasive, first trimester test. Not being bound by a theory, the present invention provides unprecedented sensitivity in detecting low amounts of fetal DNA. Not being bound by a theory, abundant amounts of maternal DNA is generally concomitantly recovered along with the fetal DNA of interest, thus decreasing sensitivity in fetal DNA quantification and mutation detection. The present invention overcomes such problems by the unexpectedly high sensitivity of the assay.

[0439] The H3 class of histones consists of four different protein types: the main types, H3.1 and H3.2; the replacement type, H3.3; and the testis specific variant, H3t. Although H3.1 and H3.2 are closely related, only differing at Ser96, H3.1 differs from H3.3 in at least 5 amino acid positions. Further, H3.1 is highly enriched in fetal liver, in comparison to its presence in adult tissues including liver, kidney and heart. In adult human tissue, the H3.3 variant is more abundant than the H3.1 variant, whereas the converse is true for fetal liver. The present invention may use these differences to detect fetal nucleosomes and fetal nucleic acid in a maternal biological sample that comprises both fetal and maternal cells and/or fetal nucleic acid.

[0440] In one embodiment, fetal nucleosomes may be obtained from blood. In other embodiments, fetal nucleosomes are obtained from a cervical mucus sample. In certain embodiments, a cervical mucus sample is obtained by swabbing or lavage from a pregnant woman early in the second trimester or late in the first trimester of pregnancy. The sample may be placed in an incubator to release DNA trapped in mucus. The incubator may be set at 37° C. The sample may be rocked for approximately 15 to 30 minutes. Mucus may be further dissolved with a mucinase for the purpose of releasing DNA. The sample may also be subjected to conditions, such as chemical treatment and the like, as well known in the art, to induce apoptosis to release fetal nucleosomes. Thus, a cervical mucus sample may be treated with an agent that induces apoptosis, whereby fetal nucleosomes are released. Regarding enrichment of circulating fetal DNA, reference is made to U.S. patent publication Nos. 20070243549 and 20100240054. The present invention is especially advantageous when applying the methods and systems to prenatal screening where only a small fraction of nucleosomes or DNA may be fetal in origin.

[0441] Prenatal screening according to the present invention may be for a disease including, but not limited to Trisomy 13, Trisomy 16, Trisomy 18, Klinefelter syndrome (47, XXY), (47, XYY) and (47, XXX), Turner syndrome, Down syndrome (Trisomy 21), Cystic Fibrosis, Huntington's Disease, Beta Thalassaemia, Myotonic Dystrophy, Sickle Cell Anemia, Porphyria, Fragile-X-Syndrome, Robertsonian translocation, Angelman syndrome, DiGeorge syndrome and Wolf-Hirschhorn Syndrome.

[0442] Several further aspects of the invention relate to diagnosing, prognosing and/or treating defects associated with a wide range of genetic diseases which are further described on the website of the National Institutes of Health under the topic subsection Genetic Disorders (website at health.nih.gov/topic/Genetic Disorders).

### Cancer and Cancer Drug Resistance Detection

[0443] In certain embodiments, the present invention may be used to detect genes and mutations associated with cancer. In certain embodiments, mutations associated with resistance are detected. The amplification of resistant tumor cells or appearance of resistant mutations in clonal populations of tumor cells may arise during treatment (see, e.g., Burger J A, et al., Clonal evolution in patients with chronic lymphocytic leukaemia developing resistance to BTK inhibition. Nat Commun. 2016 May 20; 7:11589; Landau D A, et al., Mutations driving CLL and their evolution in progression and relapse. Nature. 2015 Oct. 22; 526(7574):525-30; Landau D A, et al., Clonal evolution in hematological malignancies and therapeutic implications. Leukemia. 2014 January; 28(1):34-43; and Landau D A, et al., Evolution and impact of subclonal mutations in chronic lymphocytic leukemia. Cell. 2013 Feb. 14; 152(4):714-26). Accordingly, detecting such mutations requires highly sensitive assays and monitoring requires repeated biopsy. Repeated biopsies are inconvenient, invasive and costly. Resistant mutations can be difficult to detect in a blood sample or other noninvasively collected biological sample (e.g., blood, saliva, urine) using the prior methods known in the art. Resistant mutations may refer to mutations associated with resistance to a chemotherapy, targeted therapy, or immunotherapy.

[0444] In certain embodiments, mutations occur in individual cancers that may be used to detect cancer progression. In one embodiment, mutations related to T cell cytolytic activity against tumors have been characterized and may be detected by the present invention (see e.g., Rooney et al., Molecular and genetic properties of tumors associated with local immune cytolytic activity, Cell. 2015 January 15; 160(1-2): 48-61). Personalized therapies may be developed for a patient based on detection of these mutations (see e.g., WO2016100975A1). In certain embodiments, cancer specific mutations associated with cytolytic activity may be a mutation in a gene selected from the group consisting of CASP8, B2M, PIK3CA, SMC1A, ARID5B, TET2, ALPK2, COL5A1, TP53, DNER, NCOR1, MORC4, CIC, IRF6, MYOCD, ANKLE1, CNKSR1, NF1, SOS1, ARID2, CUL4B, DDX3X, FUBP1, TCP11L2, HLA-A, B or C, CSNK2A1, MET, ASXL1, PD-L1, PD-L2, IDO1, IDO2, ALOX12B and ALOX15B, or copy number gain, excluding whole-chromosome events, impacting any of the following chromosomal bands: 6q16.1-q21, 6q22.31-q24.1, 6q25.1-q26, 7p11.2-q11.1, 8p23.1, 8p11.23-p11.21 (containing IDO1, IDO2), 9p24.2-p23 (containing PDL1, PDL2), 10p15.3, 10p15.1-p13, 11p14.1, 12p13.32-p13.2, 17p13.1 (containing ALOX12B, ALOX15B), and 22q11.1-q11.21.

[0445] In certain embodiments, the present invention is used to detect a cancer mutation (e.g., resistance mutation) during the course of a treatment and after treatment is completed. The sensitivity of the present invention may allow for noninvasive detection of clonal mutations arising during treatment and can be used to detect a recurrence in the disease.

[0446] In certain example embodiments, detection of microRNAs (miRNA) and/or miRNA signatures of differentially expressed miRNA, may used to detect or monitor progression of a cancer and/or detect drug resistance to a cancer therapy. As an example, Nadal et al. (Nature Scientific Reports, (2015) doi:10.1038/srep12464) describe mRNA signatures that may be used to detect non-small cell lung cancer (NSCLC).

[0447] In certain example embodiments, the presence of resistance mutations in clonal subpopulations of cells may be used in determining a treatment regimen. In other embodiments, personalized therapies for treating a patient may be administered based on common tumor mutations. In certain embodiments, common mutations arise in response to treatment and lead to drug resistance. In certain embodiments, the present invention may be used in monitoring patients for cells acquiring a mutation or amplification of cells harboring such drug resistant mutations.

[0448] Treatment with various chemotherapeutic agents, particularly with targeted therapies such as tyrosine kinase inhibitors, frequently leads to new mutations in the target molecules that resist the activity of the therapeutic. Multiple strategies to overcome this resistance are being evaluated, including development of second generation therapies that are not affected by these mutations and treatment with multiple agents including those that act downstream of the resistance mutation. In an exemplary embodiment, a common mutation to ibrutinib, a molecule targeting Bruton's Tyrosine Kinase (BTK) and used for CLL and certain lymphomas, is a Cysteine to Serine change at position 481 (BTK/C481S). Erlotinib, which targets the tyrosine kinase domain of the Epidermal Growth Factor Receptor (EGFR), is commonly used in the treatment of lung cancer and resistant tumors invariably develop following therapy. A common mutation found in resistant clones is a threonine to methionine mutation at position 790.

[0449] Non-silent mutations shared between populations of cancer patients and common resistant mutations that may be detected with the present invention are known in the art (see e.g., WO/2016/187508). In certain embodiments, drug resistance mutations may be induced by treatment with ibrutinib, erlotinib, imatinib, gefitinib, crizotinib, trastuzumab, vemurafenib, RAF/MEK, check point blockade therapy, or antiestrogen therapy. In certain embodiments, the cancer specific mutations are present in one or more genes encoding a protein selected from the group consisting of Programmed Death-Ligand 1 (PD-L1), androgen receptor (AR), Bruton's Tyrosine Kinase (BTK), Epidermal Growth Factor Receptor (EGFR), BCR-Abl, c-kit, PIK3 CA, HER2, EML4-ALK, KRAS, ALK, ROS1, AKT1, BRAF, MEK1, MEK2, NRAS, RAC1, and ESR1.

[0450] Immune checkpoints are inhibitory pathways that slow down or stop immune reactions and prevent excessive tissue damage from uncontrolled activity of immune cells. In certain embodiments, the immune checkpoint targeted is the programmed death-1 (PD-1 or CD279) gene (PDCD1). In other embodiments, the immune checkpoint targeted is cytotoxic T-lymphocyte-associated antigen (CTLA-4). In additional embodiments, the immune checkpoint targeted is another member of the CD28 and CTLA4 Ig superfamily such as BTLA, LAG3, ICOS, PDL1 or KIR. In further additional embodiments, the immune checkpoint targeted is a member of the TNFR superfamily such as CD40, OX40, CD137, GITR, CD27 or TIM-3.

[0451] Recently, gene expression in tumors and their microenvironments have been characterized at the single cell level (see e.g., Tirosh, et al. Dissecting the multicellular ecosystem of metastatic melanoma by single cell RNA-seq. Science 352, 189-196, doi:10.1126/science.aad0501 (2016)); Tirosh et al., Single-cell RNA-seq supports a developmental hierarchy in human oligodendroglioma. Nature. 2016 Nov. 10; 539(7628):309-313. doi: 10.1038/nature20123. Epub 2016 Nov. 2; and International patent publication serial number WO 2017004153 A1). In certain embodiments, gene signatures may be detected using the present invention. In one embodiment complement genes are monitored or detected in a tumor microenvironment. In one embodiment MITF and AXL programs are monitored or detected. In one embodiment, a tumor specific stem cell or progenitor cell signature is detected. Such signatures indicate the state of an immune response and state of a tumor. In certain embodiments, the state of a tumor in terms of proliferation, resistance to treatment and abundance of immune cells may be detected.

[0452] Thus, in certain embodiments, the invention provides low-cost, rapid, multiplexed cancer detection panels for circulating DNA, such as tumor DNA, particularly for monitoring disease recurrence or the development of common resistance mutations.

### Immunotherapy Applications

[0453] The embodiments disclosed herein can also be useful in further immunotherapy contexts. For instance, in some embodiments methods of diagnosing, prognosing and/or staging an immune response in a subject comprise detecting a first level of expression, activity and/or function of one or more biomarker and comparing the detected level to a control level wherein a difference in the detected level and the control level indicates that the presence of an immune response in the subject.

[0454] In certain embodiments, the present invention may be used to determine dysfunction or activation of tumor infiltrating lymphocytes (TIL). TILs may be isolated from a tumor using known methods. The TILs may be analyzed to determine whether they should be used in adoptive cell transfer therapies. Additionally, chimeric antigen receptor T cells (CAR T cells) may be analyzed for a signature of dysfunction or activation before administering them to a subject. Exemplary signatures for dysfunctional and activated T cell have been described (see e.g., Singer M, et al., A Distinct Gene Module for Dysfunction Uncoupled from Activation in Tumor-Infiltrating T Cells. Cell. 2016 Sep. 8; 166(6):1500-1511.e9. doi: 10.1016/j.cell.2016.08.052).

[0455] In some embodiments, C2c2 is used to evaluate that state of immune cells, such as T cells (e.g., CD8+ and/or CD4+ T cells). In particular, T cell activation and/or dysfunction can be determined, e.g., based on genes or gene signatures associated with one or more of the T cell states. In this way, c2c2 can be used to determine the presence of one or more subpopulations of T cells.

[0456] In some embodiments, C2c2 can be used in a diagnostic assay or may be used as a method of determining whether a patient is suitable for administering an immunotherapy or another type of therapy. For example, detection of gene or biomarker signatures may be performed via c2c2 to determine whether a patient is responding to a given treatment or, if the patient is not responding, if this may be due to T cell dysfunction. Such detection is informative regarding the types of therapy the patient is best suited to receive. For example, whether the patient should receive immunotherapy.

[0457] In some embodiments, the systems and assays disclosed herein may allow clinicians to identify whether a patient's response to a therapy (e.g., an adoptive cell transfer (ACT) therapy) is due to cell dysfunction, and if it is, levels of up-regulation and down-regulation across the biomarker signature will allow problems to be addressed. For example, if a patient receiving ACT is non-responsive, the cells administered as part of the ACT may be assayed by an assay disclosed herein to determine the relative level of expression of a biomarker signature known to be associated with cell activation and/or dysfunction states. If a particular inhibitory receptor or molecule is up-regulated in the ACT cells, the patient may be treated with an inhibitor of that receptor or molecule. If a particular stimulatory receptor or molecule is down-regulated in the ACT cells, the patient may be treated with an agonist of that receptor or molecule.

[0458] In certain example embodiments, the systems, methods, and devices described herein may be used to screen gene signatures that identify a particular cell type, cell phenotype, or cell state. Likewise, through the use of such methods as compressed sensing, the embodiments disclosed herein may be used to detect transcriptomes. Gene expression data are highly structured, such that the expression level of some genes is predictive of the expression level of others. Knowledge that gene expression data are highly structured allows for the assumption that the number of degrees of freedom in the system are small, which allows for assuming that the basis for computation of the relative gene abundances is sparse. It is possible to make several biologically motivated assumptions that allow Applicants to recover the nonlinear interaction terms while under-sampling without having any specific knowledge of which genes are likely to interact. In particular, if Applicants assume that genetic interactions are low rank, sparse, or a combination of these, then the true number of degrees of freedom is small relative to the complete combinatorial expansion, which enables Applicants to infer the full nonlinear landscape with a relatively small number of perturbations. Working around these assumptions, analytical theories of matrix completion and compressed sensing may be used to design under-sampled combinatorial perturbation experiments. In addition, a kernel-learning framework may be used to employ under-sampling by building predictive functions of combinatorial perturbations without directly learning any individual interaction coefficient Compresses sensing provides a way to identify the minimal number of target transcripts to be detected in order obtain a comprehensive gene-expression profile. Methods for compressed sensing are disclosed in PCT/US2016/059230 “Systems and Methods for Determining Relative Abundances of Biomolecules” filed Oct. 27, 2016, which is incorporated herein by reference. Having used methods like compressed sensing to identify a minimal transcript target set, a set of corresponding guide RNAs may then be designed to detect said transcripts. Accordingly, in certain example embodiments, a method for obtaining a gene-expression profile of cell comprises detecting, using the embodiments disclosed, herein a minimal transcript set that provides a gene-expression profile of a cell or population of cells.

### Detecting Nucleic Acid Tagged Items

[0459] Alternatively, the embodiments described herein may be used to detect nucleic acid identifiers. Nucleic acid identifiers are non-coding nucleic acids that may be used to identify a particular article. Example nucleic acid identifiers, such as DNA watermarks, are described in Heider and Barnekow. “DNA watermarks: A proof of concept” BMC Molecular Biology 9:40 (2008). The nucleic acid identifiers may also be a nucleic acid barcode. A nucleic-acid based barcode is a short sequence of nucleotides (for example, DNA, RNA, or combinations thereof) that is used as an identifier for an associated molecule, such as a target molecule and/or target nucleic acid. A nucleic acid barcode can have a length of at least, for example, 4, 5, 6, 7, 8, 9, 10, 11, 12, 13, 14, 15, 16, 17, 18, 19, 20, 21, 22, 23, 24, 25, 26, 27, 28, 29, 30, 35, 40, 45, 50, 60, 70, 80, 90, or 100 nucleotides, and can be in single- or double-stranded form. One or more nucleic acid barcodes can be attached, or “tagged,” to a target molecule and/or target nucleic acid. This attachment can be direct (for example, covalent or non-covalent binding of the barcode to the target molecule) or indirect (for example, via an additional molecule, for example, a specific binding agent, such as an antibody (or other protein) or a barcode receiving adaptor (or other nucleic acid molecule). Target molecule and/or target nucleic acids can be labeled with multiple nucleic acid barcodes in combinatorial fashion, such as a nucleic acid barcode concatemer. Typically, a nucleic acid barcode is used to identify target molecules and/or target nucleic acids as being from a particular compartment (for example a discrete volume), having a particular physical property (for example, affinity, length, sequence, etc.), or having been subject to certain treatment conditions. Target molecule and/or target nucleic acid can be associated with multiple nucleic acid barcodes to provide information about all of these features (and more). Methods of generating nucleic acid-barcodes are disclosed, for example, in International Patent Application Publication No. WO/2014/047561.

### Enzymes

[0460] The application further provides orthologs of C2c2 which demonstrate robust activity making them particularly suitable for different applications of RNA cleavage and detection. These applications include but are not limited to those described herein. More particularly, an ortholog which is demonstrated to have stronger activity than others tested is the C2c2 ortholog identified from the organism Leptotrichia wadei (LwC2c2). The application thus provides methods for modifying a target locus of interest, comprising delivering to said locus a non-naturally occurring or engineered composition comprising a C2c2 effector protein, more particularly a C2c2 effector protein with increased activity as described herein and one or more nucleic acid components, wherein at least the one or more nucleic acid components is engineered, the one or more nucleic acid components directs the complex to the target of interest and the effector protein forms a complex with the one or more nucleic acid components and the complex binds to the target locus of interest. In particular embodiments, the target locus of interest comprises RNA. The application further provides for the use of the Cc2 effector proteins with increased activity in RNA sequence specific interference, RNA sequence specific gene regulation, screening of RNA or RNA products or lincRNA or non-coding RNA, or nuclear RNA, or mRNA, mutagenesis, Fluorescence in situ hybridization, or breeding.

[0461] The embodiments disclosed herein may also be carried out using a lateral flow assay such as that disclosed in U.S. Provisional Application Nos. 62/568,309; 62/610,144; and 62/623,529, as well as in Gootenberg et al. (Science doi:10.1126/science.aaq0179 (2018)).

[0462] Further embodiments of the invention are described in the following numbered paragraphs.

[0463] 1. A nucleic acid detection system comprising:

[0464] a CRISPR system comprising an effector protein and one or more guide RNAs designed to bind to corresponding target molecules; and

[0465] a RNA-based masking construct.

[0466] 2. A polypeptide detection system comprising:

[0467] a CRISPR system comprising an effector protein and one or more guide RNAs designed to bind to a trigger RNA;

[0468] a RNA-based masking construct; and

[0469] one or more detection aptamers comprising a masked RNA polymerase promoter binding site or a masked primer binding site.

[0470] 3. The system of paragraphs 1 or 2, further comprising nucleic acid amplification reagents.

[0471] 4. The system of paragraph 1, wherein the target molecule is a target DNA and the system further comprises a primer that binds the target DNA and comprises a RNA polymerase promoter.

[0472] 5. The system of any one of paragraphs 1 to 4, wherein the CRISPR system effector protein is a RNA-targeting effector protein.

[0473] 6. The system of paragraph 5, the RNA-targeting effector protein comprises one or more HEPN domains

[0474] 7. The system of paragraph 6, wherein the one or more HEPN domains comprises a RxxxxH motif sequence.

[0475] 8. The system of paragraph 7, wherein the RxxxH motif comprises a R{N/H/K]X₁X₂X₃H sequence.

[0476] 9. The system of paragraph 8, wherein X₁ is R, S, D, E, Q, N, G, or Y, and X₂ is independently I, S, T, V, or L, and X₃ is independently L, F, N, Y, V, I, S, D, E, or A.

[0477] 10. The system of anyone of paragraphs 1 to 9, wherein the CRISPR RNA-targeting effector protein is C2c2.

[0478] 11. The system of paragraph 6, wherein the CRISPR RNA-targeting effector protein is C2c2.

[0479] 12. The system of paragraph 11, wherein the C2c2 is within 20 kb of a Cas 1 gene. 13. The system of paragraph 12, wherein the C2c2 effector protein is from an organism of a genus selected from the group consisting of: Leptotrichia, Listeria, Corynebacter, Sutterella, Legionella, Treponema, Filifactor, Eubacterium, Streptococcus, Lactobacillus, Mycoplasma, Bacteroides, Flaviivola, Flavobacterium, Sphaerochaeta, Azospirillum, Gluconacetobacter, Neisseria, Roseburia, Parvibaculum, Staphylococcus, Nitratifractor, Mycoplasma, Campylobacter, and Lachnospira.

[0480] 14. The system of paragraph 13, wherein the C2c2 effector protein is from an organism selected from the group consisting of: Leptotrichia shahii; Leptotrichia wadei (Lw2); Listeria seeligeri; Lachnospiraceae bacterium MA2020; Lachnospiraceae bacterium NK4A179; [Clostridium] aminophilum DSM 10710; Carnobacterium gallinarum DSM 4847; Carnobacterium gallinarum DSM 4847 (second CRISPR Loci); Paludibacter propionicigenes WB4; Listeria weihenstephanensis FSL R9-0317; Listeriaceae bacterium FSL M6-0635; Leptotrichia wadei F0279; Rhodobacter capsulatus SB 1003; Rhodobacter capsulatus R121; Rhodobacter capsulatus DE442; Leptotrichia buccalis C-1013-b; Herbinix hemicellulosilytica; [Eubacterium] rectale; Eubacteriaceae bacterium CHKCI004; Blautia sp. Marseille-P2398; and Leptotrichia sp. oral taxon 879 str. F0557. Twelve (12) further non-limiting examples are: Lachnospiraceae bacterium NK4A144; Chloroflexus aggregans; Demequina aurantiaca; Thalassospira sp. TSL5-1; Pseudobutyrivibrio sp. OR37; Butyrivibrio sp. YAB3001; Blautia sp. Marseille-P2398; Leptotrichia sp. Marseille-P3007; Bacteroides ihuae; Porphyromonadaceae bacterium KH3CP3RA; Listeria riparia; and Insolitispirillum peregrinum

[0481] 15. The system of paragraph 14, wherein the C2c2 effector protein is a L. wadei F0279 or L. wadei F0279 (Lw2) C2c2 effector protein.

[0482] 16. The system of any one of paragraphs 1 to 15, wherein the RNA-based masking construct suppresses generation of a detectable positive signal.

[0483] 17. The system of paragraph 16, wherein the RNA-based masking construct suppresses generation of a detectable positive signal by masking the detectable positive signal, or generating a detectable negative signal instead.

[0484] 18. The system of paragraph 16, wherein the RNA-based masking construct comprises a silencing RNA that suppresses generation of a gene product encoded by a reporting construct, wherein the gene product generates the detectable positive signal when expressed.

[0485] 19. The system of paragraph 16, wherein the RNA-based masking construct is a ribozyme that generates the negative detectable signal, and wherein the positive detectable signal is generated when the ribozyme is deactivated.

[0486] 20. The system of paragraph 19, wherein the ribozyme converts a substrate to a first color and wherein the substrate converts to a second color when the ribozyme is deactivated.

[0487] 21. The system of paragraph 16, wherein the RNA-based masking agent is a RNA aptamer and/or comprises an RNA-tethered inhibitor.

[0488] 22. The system of paragraph 21, wherein the aptamer or RNA-tethered inhibitor sequesters an enzyme, wherein the enzyme generates a detectable signal upon release from the aptamer or RNA tethered inhibitor by acting upon a substrate.

[0489] 23. The system of paragraph 21, wherein the aptamer is an inhibitory aptamer that inhibits an enzyme and prevents the enzyme from catalyzing generation of a detectable signal from a substrate or wherein the RNA-tethered inhibitor inhibits an enzyme and prevents the enzyme from catalyzing generation of a detectable signal from a substrate.

[0490] 24. The system of paragraph 23, wherein the enzyme is thrombin, horseradish peroxidase, beta-galactosidase, or calf alkaline phosphatase.

[0491] 25. The system of paragraph 24, wherein the enzyme is thrombin and the substrate is para-nitroanilide covalently linked to a peptide substrate for thrombin, or 7-amino-4-methylcoumarin covalently linked to a peptide substrate for thrombin.

[0492] 26. The system of paragraph 21, wherein the aptamer sequesters a pair of agents that when released from the aptamers combine to generate a detectable signal.

[0493] 27. The system of paragraph 16, wherein the RNA-based masking construct comprises a RNA oligonucleotide to which a detectable ligand and a masking component are attached.

[0494] 28. The system of paragraph 16, wherein the RNA-based masking construct comprises a nanoparticle held in aggregate by bridge molecules, wherein at least a portion of the bridge molecules comprises RNA, and wherein the solution undergoes a color shift when the nanoparticle is disbursed in solution.

[0495] 29. The system of paragraph 28, wherein the nanoparticle is a colloidal metal.

[0496] 30. The system of paragraph 29, wherein the colloidal metal is colloidal gold.

[0497] 31. The system of paragraph 16, wherein the RNA-based masking construct comprising a quantum dot linked to one or more quencher molecules by a linking molecule, wherein at least a portion of the linking molecule comprises RNA.

[0498] 32. The system of paragraph 16, wherein the RNA-based masking construct comprises RNA in complex with an intercalating agent, wherein the intercalating agent changes absorbance upon cleavage of the RNA.

[0499] 33. The system of paragraph 32, wherein the intercalating agent is pyronine-Y or methylene blue.

[0500] 34. The system of paragraph 16, wherein the detectable ligand is a fluorophore and the masking component is a quencher molecule.

[0501] 35. The system of paragraph 16, wherein said masking construct comprises a RNA oligonucleotide designed to bind a G-quadruplex forming sequence, wherein a G-quadruplex structure is formed by the G-quadruplex forming sequence upon cleavage of the masking construct, and wherein the G-quadruplex structure generates a detectable positive signal.

[0502] 36. The system according to any of paragraphs 1 to 35, wherein the one or more guide RNAs designed to bind to corresponding target molecules comprise a synthetic mismatch.

[0503] 37. The system according to paragraph 36, wherein said mismatch is up- or downstream of a SNP or other single nucleotide variation in said target molecule.

[0504] 38. The detection system of paragraphs 36 or 37, wherein said synthetic mismatch or other single nucleotide variation in said guide RNA is at position 3, 4, 5, or 6 of the spacer, preferably position 3.

[0505] 39. The detection system of any of paragraphs 36 to 38, wherein said synthetic mismatch in said guide RNA is at position 1, 2, 3, 4, 5, 6, 7, 8, or 9 of the spacer, preferably position 5.

[0506] 40. The detection system of any of paragraphs 36 to 39, wherein said synthetic mismatch is 1, 2, 3, 4, or 5 nucleotides upstream or downstream, preferably 2 nucleotides, preferably downstream of said SNP or other single nucleotide variation in said guide RNA.

[0507] 41. The detection system of any of paragraphs 36 to 40, wherein said guide RNA comprises a spacer which is truncated relative to a wild type spacer.

[0508] 42. The detection system of paragraph 41, wherein said guide RNA comprises a spacer which comprises less than 28 nucleotides, preferably between and including 20 to 27 nucleotides.

[0509] 43. The detection system of paragraph 42, wherein guide RNA comprises a spacer which consists of 20-25 nucleotides or 20-23 nucleotides, such as preferably 20 or 23 nucleotides.

[0510] 44. The detection system of any one of paragraphs 1 to 43, wherein the one or more guide RNAs are designed to detect a single nucleotide polymorphism in a target RNA or DNA, or a splice variant of a RNA transcript

[0511] 45. A method for detecting viruses in samples, comprising:

[0512] distributing a sample or set of samples into one or more individual discrete volumes, the individual discrete volumes comprising a CRISPR system of any one of paragraphs 1 to 44;

[0513] incubating the sample or set of samples under conditions sufficient to allow binding of the one or more guide RNAs to one or more target molecules;

[0514] activating the CRISPR effector protein via binding of the one or more guide RNAs to the one or more target molecules, wherein activating the CRISPR effector protein results in modification of the RNA-based masking construct such that a detectable positive signal is generated; and

[0515] detecting the detectable positive signal, wherein detection of the detectable positive signal indicates a presence of one or more viruses in the sample.

[0516] 46. The method of paragraph 45, wherein the sample comprises two or more viruses, and wherein the method distinguishes between the two or more viruses.

[0517] 47. The method of paragraphs 45 or 46, wherein the guide RNAs detect single nucleotide variants of the one or more viruses.

[0518] 48. The method of paragraph 47, wherein the guide RNAs further comprise one or more synthetic mismatches.

[0519] 49. The method of any one of paragraphs 45 to 47, wherein the guide RNAs of the one or more CRISPR systems comprise a pan-viral guide RNA set that detects each virus and/or viral strain in a set of viruses.

[0520] 50. The method of paragraph 49, wherein the guide RNAs are derived using a set cover approach.

[0521] 51. A method of detecting viruses, comprising:

[0522] exposing a CRISPR system of any one of paragraphs 1 to 36 to a sample;

[0523] activating the RNA effector protein via binding of the one or more guide RNAs to the one or more microbe-specific target RNAs or one or more trigger RNAs such that a detectable positive signal is produced; and

[0524] detecting the detectable positive signal, wherein detection of the detectable positive signal indicates a presence of one or more viruses in the sample.

[0525] 52. The method of paragraph 51, wherein the CRISPR system is on a substrate, and wherein the substrate is exposed to the sample.

[0526] 53. The method of paragraph 52, wherein the same or a different CRISPR system is applied to multiple discrete locations on the substrate.

[0527] 54. The method of paragraph 53, wherein the same or a different CRISPR system is applied to multiple discrete locations on the substrate.

[0528] 55. The method of any of paragraphs 52 to 54, wherein the substrate is a flexible materials substrate.

[0529] 56. The method of paragraph 55, wherein the flexible materials substrate is a paper substrate, a fabric substrate, or a flexible polymer-based substrate.

[0530] 57. The method of paragraph 54, wherein the different CRISPR system detects a different microbe at each location.

[0531] 58. The method of paragraph 55, wherein the substrate is exposed to the sample passively, by temporarily immersing the substrate in a fluid to be sampled, by applying a fluid to be tested to the substrate, or by contacting a surface to be tested with the substrate.

[0532] 59. The method of paragraph 58, wherein the sample is a biological or environmental sample.

[0533] 60. The method of paragraph 59, wherein the environmental sample is obtained from a food sample, a beverage sample, a paper surface, a fabric surface, a metal surface, a wood surface, a plastic surface, a soil sample, a fresh water sample, a waste water sample, a saline water sample, exposure to atmospheric air or other gas sample, or a combination thereof.

[0534] 61. The method of paragraph 59, wherein the biological sample is obtained from a tissue sample, saliva, blood, plasma, sera, stool, urine, sputum, mucous, lymph, synovial fluid, cerebrospinal fluid, ascites, pleural effusion, seroma, pus, or swab of skin or a mucosal membrane surface.

[0535] 62. The method of any one of paragraphs 59 to 61, wherein the environmental sample or biological samples are crude samples and/or wherein the one or more target molecules are not purified or amplified from the sample prior to application of the method.

[0536] 63. A method for monitoring viral disease outbreaks and/or evolution, comprising:

[0537] exposing a CRISPR system of any one of paragraphs 1 to 36 to a sample:

[0538] activating the RNA effector protein via binding of the one or more guide RNAs to the one or more target sequences comprising non-synonymous viral mutations such that a detectable positive signal is produced; and

[0539] detecting the detectable positive signal, wherein detection of the detectable positive signal indicates a type of viral strain that is present in the sample.

[0540] 64. The method of paragraph 63, wherein exposing the CRISPR system comprises locating one or more CRISPR systems within one or more individual discrete volumes and adding a sample or sample aliquot to the one or more individual discrete volumes.

[0541] 65. A method for screening samples for viral antigens and/or viral specific antibodies comprising:

[0542] exposing a CRISPR system of any one of paragraphs 2 to 36 to a sample, wherein the one or more aptamers bind to one or more viral antigens or one or more viral-specific antibodies, and wherein the aptamers encode a barcode that identifies the one or more viral antigens or one or more viral-specific antibodies that the one or more aptamers bind to, and wherein the guide-RNAs are designed to detect the barcode;

[0543] activating the RNA effector protein via binding of the one or more guide RNAs to the one or more microbe-specific target RNAs or one or more trigger RNAs such that a detectable positive signal is produced; and

[0544] detecting the detectable positive signal, wherein detection of the detectable positive signal indicates a presence of one or more viral antigens or one/or more viral specific antibodies in the sample.

[0545] 66. The method of any one of paragraphs 45 to 65, wherein the virus is a DNA virus.

[0546] 67. The method of paragraph 66, wherein the DNA virus is a is a Myoviridae, Podoviridae, Siphoviridae, Alloherpesviridae, Herpesviridae (including human herpes virus, and Varicella Zozter virus), Malocoherpesviridae, Lipothrixviridae, Rudiviridae, Adenoviridae, Ampullaviridae, Ascoviridae, Asfarviridae (including African swine fever virus), Baculoviridae, Cicaudaviridae, Clavaviridae, Corticoviridae, Fuselloviridae, Globuloviridae, Guttaviridae, Hytrosaviridae, Iridoviridae, Maseilleviridae, Mimiviridae, Nudiviridae, Nimaviridae, Pandoraviridae, Papillomaviridae, Phycodnaviridae, Plasmaviridae, Polydnaviruses, Polyomaviridae (including Simian virus 40, JC virus, BK virus), Poxviridae (including Cowpox and smallpox), Sphaerolipoviridae, Tectiviridae, Turriviridae, Dinodnavirus, Salterprovirus, Rhizidovirus, or combination thereof.

[0547] 68. The method of any one of paragraphs 45 to 65, wherein the viral infection is caused by a double-stranded RNA virus, a positive sense RNA virus, a negative sense RNA virus, a retrovirus, or a combination thereof.

[0548] 69. The method of paragraph 68, wherein the virus is a Coronaviridae virus, a Picornaviridae virus, a Caliciviridae virus, a Flaviviridae virus, a Togaviridae virus, a Bornaviridae, a Filoviridae, a Paramyxoviridae, a Pneumoviridae, a Rhabdoviridae, an Arenaviridae, a Bunyaviridae, an Orthomyxoviridae, or a Deltavirus.

[0549] 70. The method of paragraph 68, wherein the virus is Coronavirus, SARS, Poliovirus, Rhinovirus, Hepatitis A, Norwalk virus, Yellow fever virus, West Nile virus, Hepatitis C virus, Dengue fever virus, Zika virus, Rubella virus, Ross River virus, Sindbis virus, Chikungunya virus, Borna disease virus, Ebola virus, Marburg virus, Measles virus, Mumps virus, Nipah virus, Hendra virus, Newcastle disease virus, Human respiratory syncytial virus, Rabies virus, Lassa virus, Hantavirus, Crimean-Congo hemorrhagic fever virus, Influenza, or Hepatitis D virus

[0550] 71. A method for detecting one or more microbes in a sample, comprising:

[0551] contacting a sample with a nucleic acid detection system according to any of paragraphs 1 to 44; and

[0552] applying said contacted sample to a lateral flow immunochromatographic assay.

[0553] 72. The method according to paragraph 71, wherein said nucleic acid detection system comprises an RNA-based masking construct comprising a first and a second molecule, and wherein said lateral flow immunochromatographic assay comprises detecting said first and second molecule, preferably at discrete detection sites on a lateral flow strip.

[0554] 73. The method according to paragraph 72, said first molecule and said second molecule is detected by binding to an antibody recognizing said first or second molecule and detecting said bound molecule, preferably with sandwich antibodies.

[0555] 74. The method according to paragraph 72 or 73, wherein said lateral flow strip comprises an upstream first antibody directed against said first molecule, and a downstream second antibody directed against said second molecule, and wherein uncleaved RNA-based masking construct is bound by said first antibody if the target nucleic acid is not present in said sample, and wherein cleaved RNA-based masking construct is bound both by said first antibody and said second antibody if the target nucleic acid is present in said sample.

[0556] 75. A method of detecting a virus, comprising:

[0557] obtaining a sample from a subject, wherein the sample is urine, sera, blood or saliva;

[0558] amplifying the sample RNA;

[0559] combining the sample with an effector protein, one or more guide RNAs designed to bind to corresponding virus-specific target molecules, and a RNA-based masking construct,

[0560] activating the RNA effector protein via binding of the one or more guide RNAs to the one or more virus-specific target RNAs, wherein activating the CRISPR effector protein results in modification of the RNA-based masking construct such that a detectable positive signal is produced; and

[0561] detecting the signal, wherein detection of the signal indicates the presence of the virus; and

[0562] wherein the method does not include a step of extracting RNA from the sample.

[0563] 76. The method of paragraph 75, wherein the amplification step is of a duration selected from the group consisting of: 2 hours, 1 hour, 30 minutes, 20 minutes and 10 minutes.

[0564] 77. The method of paragraph 75, wherein the detection step is of a duration selected from the group consisting of: 3 hours, 2 hours, 1 hour, 30 minutes, 20 minutes and 10 minutes.

[0565] 78. The method of paragraph 75, wherein the volume of sample required for detection is 100 μl to 1 μl.

[0566] 79. The method of paragraph 75, wherein the virus is Zika virus.

[0567] 80. The method of paragraph 75, wherein the sample comprises two or more viruses and wherein the method distinguishes between the two or more viruses.

[0568] 81. The method of paragraph 75, wherein the RNA-based masking construct comprises

### EXAMPLES

### Example 1—General Protocols

[0569] There are two ways to perform a C2c2 diagnostic test for DNA and RNA. This protocol may also be used with protein detection variants after delivery of the detection aptamers. The first is a two step reaction where amplification and C2c2 detection are done separately. The second is where everything is combined in one reaction and this is called a two-step reaction. It is important to keep in mind that amplification might not be necessary for higher concentration samples so it's good to have a separate C2c2 protocol that doesn't have amplification built in.

TABLE 10
CRISPR Effector Only - No amplification:

| Component | Volume (μL) |
|---|---|
| Protein (44 nM final) | 2 |
| crRNA (12 nM final) | 1 |
| background target (100 ng total) | 1 |
| Target RNA (variable) | 1 |
| RNA sensor probe (125 nM) | 4 |
| MgCl₂ (6 mM final) | 2 |
| Reaction Buffer 10x | 2 |
| RNAse Inhibitors (murine from NEB) | 2 |
| H₂O | 5 |
| total | 20 |

[0570] Reaction buffer is: 40 mM Tris-HCl, 60 mM NaCl, pH 7.3

[0571] Perform this reaction for 20 min-3 hrs at 37° C. Read out with excitation: 485 nm/20 nm, emission: 528 nm/20 nm. A signal for single molecule sensitivity may be detected beginning at 20 min but of course sensitivity is higher for longer reaction times. Two step reaction:

TABLE 11
RPA amplification mix

| Component | Volume (μL) |
|---|---|
| Primer A (100 μM) | 0.48 |
| Primer B (100 μM) | 0.48 |
| RPA Buffer | 59 |
| MgAc | 5 |
| Target (variable concentration) | 5 |
| ATP (100 μM from NEB kit) | 2 |
| GTP (100 μM from NEB kit) | 2 |
| UTP (100 μM from NEB kit) | 2 |
| CTP (100 μM from NEB kit) | 2 |
| T7 Polymerase (from NEB kit) | 2 |
| H₂O | 25 |
| total | 104.96 |

[0572] Mix this reaction together and then re-suspend two to three tubes of freeze-dried enzyme mix). Add 5 μL of 280 mM MgAc to the mix to begin the reaction. Preform reaction for 10-20 min. Each reaction is 20 μL so this is enough for up to five reactions.

TABLE 12
C2c2 detection mix

| Component | Volume (μL) |
|---|---|
| Protein (44 nM final) | 2 |
| crRNA (12 nM final) | 1 |
| background target (100 ng total) | 1 |
| RPA reaction | 1 |
| RNA sensor probe (125 nM) | 4 |
| MgCl₂ (6 mM final) | 2 |
| Reaction Buffer 10x | 2 |
| RNAse Inhibitors (murine from NEB) | 2 |
| H₂O | 5 |
| total | 20 |

[0573] Reaction buffer is: 40 mM Tris-HCl, 60 mM NaCl, pH 7.3

[0574] Perform this for 20 min-3 hours. Minimum detection time is about 20 min to see single molecule sensitivity. Performing the reaction for longer only boosts the sensitivity.

TABLE 13
One pot reaction:

| Component | Volume (μL) |
|---|---|
| Primer A (100 μM) | 0.48 |
| Primer B (100 μM) | 0.48 |
| RPA Buffer | 59 |
| MgAc | 5 |
| Lw2C2c2 (44 nM final) | 2 |
| crRNA (12 nM final) | 2 |
| Background RNA (from 250 ng/μL) | 2 |
| RNAse alert substr (after resuspending in 20 μL) | 5 |
| murine RNAse inhib from NEB | 10 |
| Target (variable concentration) | 5 |
| ATP (100 μM from NEB kit) | 2 |
| GTP (100 μM from NEB kit) | 2 |
| UTP (100 μM from NEB kit) | 2 |
| CTP (100 μM from NEB kit) | 2 |
| T7 Polymerase (from NEB kit) | 2 |
| H₂O | 4 |
| total | 104.96 |

[0575] The NEB kit referenced is the HighScribe T7 High Yield Kit. To resuspend buffer, use a 1.5× concentration: resuspend three tubes of freeze dried substrate in 59 L of buffer and use in the mix above. Each reaction is 20 μL so this is enough for 5 reactions worth. Single molecule sensitivity with this reaction has been observed in as early as 30-40 min.

### Example 2—C2C2 from Leptotrichia wadei Mediates Highly Sensitive and Specific Detection of DNA and RNA

[0576] Rapid, inexpensive, and sensitive nucleic acid detection may aid point-of-care pathogen detection, genotyping, and disease monitoring. The RNA-guided, RNA-targeting CRISPR effector Cas13a (previously known as C2c2) exhibits a “collateral effect” of promiscuous RNAse activity upon target recognition. We combine the collateral effect of Cas13a with isothermal amplification to establish a CRISPR-based diagnostic (CRISPR-Dx), providing rapid DNA or RNA detection with attomolar sensitivity and single-base mismatch specificity. We use this Cas13a-based molecular detection platform, termed SHERLOCK (Specific High Sensitivity Enzymatic Reporter UnLOCKing), to detect specific strains of Zika and Dengue virus, distinguish pathogenic bacteria, genotype human DNA, and identify cell-free tumor DNA mutations. Furthermore, SHERLOCK reaction reagents can be lyophilized for cold-chain independence and long-term storage, and readily reconstituted on paper for field applications.

[0577] The ability to rapidly detect nucleic acids with high sensitivity and single-base specificity on a portable platform may aid in disease diagnosis and monitoring, epidemiology, and general laboratory tasks. Although methods exist for detecting nucleic acids (1-6), they have trade-offs among sensitivity, specificity, simplicity, cost, and speed. Microbial Clustered Regularly Interspaced Short Palindromic Repeats (CRISPR) and CRISPR-associated (CRISPR-Cas) adaptive immune systems contain programmable endonucleases that can be leveraged for CRISPR-based diagnostics (CRISPR-Dx). While some Cas enzymes target DNA (7, 8), single effector RNA-guided RNases, such as Cas13a (previously known as C2c2) (8), can be reprogrammed with CRISPR RNAs (crRNAs) (9-11) to provide a platform for specific RNA sensing. Upon recognition of its RNA target, activated Cas13a engages in “collateral” cleavage of nearby non-targeted RNAs (10). This crRNA-programmed collateral cleavage activity allows Cas13a to detect the presence of a specific RNA in vivo by triggering programmed cell death (10) or in vitro by nonspecific degradation of labeled RNA (10, 12). Here we describe SHERLOCK (Specific High Sensitivity Enzymatic Reporter UnLOCKing), an in vitro nucleic acid detection platform with attomolar sensitivity based on nucleic acid amplification and 3 Cas13a-mediated collateral cleavage of a commercial reporter RNA (12), allowing for real-time detection of the target (FIG. 17).

### Methods

### Cloning of C2c2 Loci and Proteins for Expression

[0578] For the bacterial in vivo efficiency assay, C2c2 proteins from Leptotrichia wadei F0279 and Leptotrichia shahii were ordered as codon-optimized genes for mammalian expression (Genscript, Jiangsu, China) and cloned into pACYC 184 backbones along with the corresponding direct repeats flanking either a beta-lactamase targeting or non-targeting spacer. Spacer expression was driven by a J23119 promoter.

[0579] For protein purification, mammalian codon-optimized C2c2 proteins were cloned into bacterial expression vector for protein purification (6×His/Twin Strep SUMO, a pET-based expression vector received as a gift from Ilya Finkelstein).

### Bacterial In Vivo C2c2 Efficiency Assay

[0580] LwC2c2 and LshC2c2 in vivo efficiency plasmids and a previously described beta-lactamase plasmid (Abudayyeh 2016) were co-transformed into NovaBlue Singles competent cells (Millipore) at 90 ng and 25 ng, respectively. After transformation, dilutions of cells were plated on ampicillin and choramphicol LB-agar plate and incubated overnight at 37 C. Colonies were counted the next day.

Nucleic Acid Target and crRNA Preparation

[0581] Nucleic acid targets were PCR amplified with KAPA Hifi Hot Start (Kapa Biosystems), gel extracted and purified using MinElute gel extraction kit (Qiagen). Purified dsDNA was incubated with T7 polymerase overnight at 30° C. using the HiScribe T7 Quick High Yield RNA Synthesis kit (New England Biolabs) and RNA was purified with the MEGAclear Transcription Clean-up kit (Thermo Fisher)

[0582] For preparation of crRNA, constructs were ordered as DNA (Integrated DNA Technologies) with an appended T7 promoter sequence. crRNA DNA was annealed to a short T7 primer (final concentrations 10 uM) and incubated with T7 polymerase overnight at 37° C. using the HiScribe T7 Quick High Yield RNA Synthesis kit (New England Biolabs). crRNA were purified using RNAXP clean beads (Beckman Coulter) at 2× ratio of beads to reaction volume, with an additional 1.8× supplementation of isopropanol (Sigma)

### NASBA Isothermal Amplification

[0583] Details of NASBA reaction are described in [Pardee 2016]. For a 20 μL total reaction volume, 6.7 μL of reaction buffer (Life Sciences, NECB-24), 3.3 μL of Nucleotide Mix (Life Sciences, NECN-24), 0.5 μL of nuclease-free water, 0.4 μL of 12.5 μM NASBA primers, 0.1 uL of RNase inhibitor (Roche, 03335402001) and 4 μL of RNA amplicon (or water for the negative control) were assembled at 4° C. and incubated 65° C. for 2 min and then 41° C. for 10 min. 5 μL of enzyme mix (Life Sciences, NEC-1-24) was added to each reaction, and the reaction mixture was incubated at 41° C. for 2 hr. NASBA primers used were 5′-AATTCTAATACGACTCACTATAGGGGGATCCTCTAGAAATATGGATT-3′ (SEQ ID NO: 16) and 5′-CTCGTATGTTGTGTGGAATTGT-3′ (SEQ ID NO: 17), and the underlined part indicates T7 promoter sequence.

### Recombinase Polymerase Amplification

[0584] Primers for RPA were designed using NCBI Primer blast (Ye et al., BMC Bioinformaics 13, 134 (2012) using default parameters, with the exception of amplicon size (between 100 and 140 nt), primer melting temperatures (between 54 C and 67 C) and primer size (between 30 and 35 nt). Primers were then ordered as DNA (Integrated DNA Technologies).

[0585] RPA and RT-RPA reactions run were as instructed with TwistAmp® Basic or TwistAmp® Basic RT (TwistDx), respectively, with the exception that 280 mM MgAc was added prior to the input template. Reactions were run with 1 uL of input for 2 hr at 37 C, unless otherwise described.

### LwC2c2 Protein Purification

[0586] C2c2 bacterial expression vectors were transformed into Rosetta™ 2(DE3) pLysS Singles Competent Cells (Millipore). A 16 mL starter culture was grown in Terrific Broth 4 growth media (12 g/L tryptone, 24 g/L yeast extract, 9.4 g/L K2HPO, 2.2 g/L KH2PO4, Sigma) (TB) was used to inoculate 4L of TB, which was incubated at 37 C, 300 RPM until an OD600 of 0.6. At this time, protein expression was induced by supplementation with IPTG (Sigma) to a final concentration of 500 uM, and cells were cooled to 18 C for 16 h for protein expression. Cells were then centrifuged at 5200 g, 15 min, 4 C. Cell pellet was harvested and stored at −80 C for later purification.

[0587] All subsequent steps of the protein purification are performed at 4 C. Cell pellet was crushed and resuspended in lysis buffer (20 mM Tris-Hcl, 500 mM NaCl, 1 mM DTT, pH 8.0) supplemented with protease inhibitors (Complete Ultra EDTA-free tablets), lysozyme, and benzonase followed by sonication (Sonifier 450, Branson, Danbury, Conn.) with the following conditions: amplitude of 100 for 1 second on and 2 seconds off with a total sonication time of 10 minutes. Lysate was cleared by centrifugation for 1 hour at 4 C at 10,000 g and the supernatant was filtered through a Stericup 0.22 micron filter (EMD Millipore). Filtered supernatant was applied to StrepTactin Sepharose (GE) and incubated with rotation for 1 hour followed by washing of the protein-bound StrepTactin resin three times in lysis buffer. The resin was resuspended in SUMO digest buffer (30 mM Tris-HCl, 500 mM NaCl 1 mM DTT, 0.15% Igepal (NP-40), pH 8.0) along with 250 Units of SUMO protease (ThermoFisher) and incubated overnight at 4 C with rotation. Digestion was confirmed by SDS-PAGE and Commassie Blue staining and the protein eluate was isolated by spinning the resin down. Protein was loaded onto a 5 mL HiTrap SP HP cation exchange column (GE Healthcare Life Sciences) via FPLC (AKTA PURE, GE Healthcare Life Sciences) and eluted over a salt gradient from 130 mM to 2M NaCl in elution buffer (20 mM Tris-HCl, 1 mM DTT, 5% Glycerol, pH 8.0). The resulting fractions were tested for presence of LwC2c2 by SDS-PAGE and fractions containing the protein were pooled and concentrated via a Centrifugal Filter Unit to 1 mL in S200 buffer (10 mM HEPES, 1M NaCl, 5 mM MgCl2, 2 mM DTT, pH 7.0). The concentrated protein was loaded onto a gel filtration column (Superdex® 200 Increase 10/300 GL, GE Healthcare Life Sciences) via FPLC. The resulting fractions from gel filtration were analyzed by SDS-PAGE and fractions containing LwC2c2 were pooled and buffer exchanged into Storage Buffer (600 mM NaCl, 50 mM Tris-HCl pH 7.5, 5% Glycerol, 2 mM DTT) and frozen at −80 C for storage.

### LwC2c2 Collateral Detection

[0588] Detection assays were performed with 45 nM purified LwC2c2, 22.5 nM crRNA, 125 nM substrate reporter (Thermo Scientific RNAse Alert v2), 2 μL murine RNase inhibitors, 100 ng of background total RNA and varying amounts of input nucleic acid target, unless otherwise indicated, in nuclease assay buffer (40 mM Tris-HCl, 60 mM NaCl, 6 mM MgCl2, pH 7.3). If the input was amplified DNA including a T7 promoter from a RPA reaction, the above C2c2 reaction was modified to include 1 mM ATP, 1 mM GTP, 1 mM UTP, 1 mM CTP and 0.6 L T7 polymerase mix (NEB). Reactions were allowed to proceed for 1-3 hours at 37° C. (unless otherwise indicated) on a fluorescent plate reader (BioTek) with fluorescent kinetics measured every 5 minutes.

[0589] The one-pot reaction combining, RPA-DNA amplification, T7 polymerase conversion of DNA to RNA and C2c2 detection was performed by integrating the reaction conditions above with the RPA amplification mix. Briefly, in a 50L one-pot assay consisted of 0.4 μM forward primer, 0.4 μM reverse primer, 1×RPA rehydration buffer, varying amounts of DNA input, 45 nM LwC2c2 recombinant protein, 22.5 nM crRNA, 250 ng background total RNA, 200 nM substrate reporter (RNase alert v2), 4 uL RNase inhibitor, 2 mM ATP, 2 mM GTP, 2 mM UTP, 2 mM CTP, 1 μL T7 polymerase mix, 5 mM MgCl2, and 14 mM MgAc.

Quantitative PCR (qPCR) Analysis with TaqMan Probes

[0590] To compare SHERLOCK quantification with other established methods, qPCR on a dilution series of ssDNA 1 was performed. A TaqMan probe and primer set (sequences below) were designed against ssDNA 1 and synthesized with IDT. Assays were performed using the TaqMan Fast Advanced Master Mix (Thermo Fisher) and measured on a Roche LightCycler 480.

TABLE 14
qPCR primer/probe sequences.

| Name | Sequence |
|---|---|
| Forward | GTG GAA TTG TGA GCG GAT AAA C |
| Primer | (SEQ ID NO: 420) |
| Reverse | AAC AGC AAT CTA CTC GAC CTG |
| Primer | (SEQ ID NO: 421) |
| TaqMan | /56-FAM/AGGAAACAG/ZEN/CTATGACCATGATTAC |
| Probe | GCC/3IABkFQ/ |
| | (SEQ ID NOs: 422, 423 and 623 |

Real-Time RPA with SYBR Green II

[0591] To compare SHERLOCK quantification with other established methods, we performed RPA on a dilution series of ssDNA 1. To quantitate accumulation of DNA in real-time, we added 1×SYBR Green II (Thermo Fisher) to the typical RPA reaction mixture described above, which provides a fluorescent signal that correlates with the amount of nucleic acid. Reactions were allowed to proceed for 1 hr at 37° C. on a fluorescent plate reader (BioTek) with fluorescent kinetics measured every 5 min.

### Lentivirus Preparation and Processing

[0592] Lentivirus preparation and processing was based on the previously known methods. Briefly, 10 μg pSB700 derivatives that include a Zika or Dengue RNA fragment, 7.5 μg psPAX2, and 2.5 μg pMD2.G were transfected to HEK293FT cells (Life Technologies, R7007) using the HeBS-CaCl2 method. 28 hr after changing media, DMEM supplemented with 10% FBS, 1% penicillin-streptomycin and 4 mM GlutaMAX (ThermoFisher Scientific), the supernatant was filtered using a 0.45 m syringe filter. ViralBind Lentivirus Purification Kit (Cell Biolabs, VPK-104) and Lenti-X Concentrator (Clontech, 631231) were used to purify and prepare lentiviruses from the supernatant. Viral concentration was quantified using QuickTiter Lentivirus Kit (Cell Biolabs, VPK-112). Viral samples were spiked into 7% human serum (Sigma, H4522), were heated to 95° C. for 2 min and were used as input to RPA.

Isolation and cDNA Purification of Zika Human Serum Samples

[0593] Suspected Zika positive human serum or urine samples were inactivated with AVL buffer (Qiagen) and isolation of RNA was achieved with QIAamp Viral RNA minikit (Qiagen). Isolated RNA was converted into cDNA by mixing random primers, dNTPs, and sample RNA followed by heat denaturation for 7 minutes at 70° C. Denatured RNA was then reverse transcribed with Superscript III (Invitrogen) incubating at 22-25° C. for 10 minutes, 50° C. for 45 minutes, 55° C. for 15 minutes, and 80° C. for 10 minutes. cDNA was then incubated for 20 minutes at 37° C. with RNAse H (New England Biolabs) to destroy RNA in the RNA:cDNA hybrids.

Genomic DNA Extraction from Human Saliva

[0594] 2 mL of saliva was collected from volunteers, who were restricted from consuming food or drink 30 minutes prior to collection. Samples were then processed using QIAamp® DNA Blood Mini Kit (Qiagen) as recommended by the kit protocol. For boiled saliva samples, 400 μL of phosphate buffered saline (Sigma) was added to 100 μL of volunteer saliva and centrifuged for 5 min at 1800 g. The supernatant was decanted and the pellet was resuspended in phosphate buffered saline with 0.2% Triton X-100 (Sigma) before incubation at 95° C. for 5 min. 1 μL of sample was used as direct input into RPA reactions.

### Freeze-Drying and Paper Deposition

[0595] A glass fiber filter paper (Whatman, 1827-021) was autoclaved for 90 min (Consolidated Stills and Sterilizers, MKII) and was blocked in 5% nuclease-free BSA (EMD Millipore, 126609-10GM) overnight. After rinsing the papers once with nuclease-free water (Life technologies, AM9932), they were incubated with 4% RNAsecure™ (Life technologies, AM7006) at 60° C. for 20 min and were rinsed three more times with the nuclease-free water. Treated papers were dried for 20 min at 80° C. on a hot plate (Cole-Parmer, IKA C-Mag HS7) prior to use. 1.8 μL of C2c2 reaction mixture as indicated earlier was put onto the disc (2 mm) that was placed in black, clear bottom 384-well plate (Corning, 3544). For the freeze-dried test, the plate containing reaction mixture discs was flash frozen in liquid nitrogen and was freeze-dried overnight as described in Pardee et al (2). RPA samples were diluted 1:10 in nuclease-free water, and 1.8 μL of the mixture was loaded onto the paper discs and incubated at 37° C. using a plate reader (BioTek Neo).

### Bacterial Genomic DNA Extraction

[0596] For experiments involving CRE detection, bacterial cultures were grown in lysogeny broth (LB) to mid-log phase, then pelleted and subjected to gDNA extraction and purification using the Qiagen DNeasy Blood and Tissue Kit, using the manufacturer's protocol for either Gram negative or Gram positive bacteria, as appropriate. gDNA was quantified by the Quant-It dsDNA assay on a Qubit fluorometer and its quality assessed via 200-300 nm absorbance spectrum on a Nanodrop spectrophotometer.

[0597] For experiments discriminating between E. coli and P. aeruginosa, bacterial cultures were grown to early stationary phase in Luria-Bertani (LB) broth. 1.0 mL of both E. coli and P. aeruginosa were processed using the portable PureLyse bacteria gDNA extraction kit (Claremont BioSolutions). 1× binding buffer was added to the bacterial culture before passing through the battery-powered lysis cartridge for three minutes. 0.5× binding buffer in water was used as a wash solution before eluting with 150 μL of water.

### Digital Droplet PCR Quantification

[0598] To confirm the concentration of ssDNA 1 and ssRNA 1 standard dilutions used in FIG. 1C, we performed digital-droplet PCR (ddPCR). For DNA quantification, droplets were made using the ddPCR Supermix for Probes (no dUTP) with PrimeTime qPCR probes/primer assays designed to target the ssDNA 1 sequence. For RNA quantification, droplets were made using the one-step RT-ddPCR kit for probes with PrimeTime qPCR probes/primer assays designed to target the ssRNA 1 sequence. Droplets were generated in either case using the QX200 droplet generator (BioRad) and transferred to a PCR plate. Droplet-based amplification was performed on a thermocycler as described in the kit's protocol and nucleic acid concentrations were subsequently determined via measurement on a QX200 droplet reader.

### Synthetic Standards for Human Genotyping

[0599] To create standards for accurate calling of human sample genotypes, we designed primers around the SNP target to amplify ˜200 bp regions from human genomic DNA representing each of the two homozygous genotypes. The heterozygous standard was then made by mixing the homozygous standards in a 1:1 ratio. These standards were then diluted to equivalent genome concentrations (˜0.56 fg/μL) and used as input for SHERLOCK alongside real human samples.

Detection of Tumor Mutant Cell Free-DNA (cfDNA)

[0600] Mock cfDNA standards simulating actual patient cfDNA samples were purchased from a commercial vendor (Horizon Discovery Group). These standards were provided as four allelic fractions (100% WT and 0.1%, 1%, and 5% mutant) for both the BRAF V600E and EGFR L858R mutants. 3 μL of these standards were provided as input to SHERLOCK

### Analysis of Fluorescence Data

[0601] To calculate background subtracted fluorescence data, the initial fluorescence of samples was subtracted to allow for comparisons between different conditions. Fluorescence for background conditions (either no input or no crRNA conditions) were subtracted from samples to generate background subtracted fluorescence.

[0602] Guide ratios for SNP or strain discrimination were calculated by dividing each guide by the sum of guide values, to adjust for sample-to-sample overall variation. crRNA ratios for SNP or strain discrimination were calculated to adjust for sample-to-sample overall variation as follows:

$$crRNA {A}_{i} ratio = \frac{( m + n ) {A}_{i}}{{\sum }_{i = 1}^{m} {A}_{i} + {\sum }_{i = 1}^{n} {B}_{i}}$$

where Ai and Bi refer to the SHERLOCK intensity values for technical replicate i of the crRNAs sensing allele A or allele B, respectively, for a given individual. Since we typically have four technical replicates per crRNA, m and n are equal to 4 and the denominator is equivalent to the sum of all eight of the crRNA SHERLOCK intensity values for a given SNP locus and individual. Because there are two crRNAs, the crRNA ratio average across each of the crRNAs for an individual will always sum to two. Therefore, in the ideal case of homozygosity, the mean crRNA ratio for the positive allele crRNA will be two and the mean crRNA ratio for the negative allele crRNA will be zero. In the ideal case of heterozygosity, the mean crRNA ratio for each of the two crRNAs will be one.

### Characterization of LwCas13a Cleavage Requirements.

[0603] The protospacer flanking site (PFS) is a specific motif present near the target site that is required for robust ribonuclease activity by Cas13a. The PFS is located at the 3′ end of the target site and was previously characterized for LshCas13a by our group as H (not G) (1). Although this motif is akin to a protospacer adjacent motif (PAM), a sequence restriction for DNAtargeting Class 2 systems, it is functionally different as it not involved in preventing selftargeting of CRISPR loci in endogenous systems. Future structural studies of Cas13a will likely elucidate the importance of the PFS for Cas13a:crRNA target complex formation and cleavage activity.

[0604] We purified the recombinant LwCas13a protein from E. coli (FIG. 2D-E) and assayed its ability to cleave a 173-nt ssRNA with each possible protospacer flanking site (PFS) nucleotide (A, U, C or G) (FIG. 2F). Similar to LshCas13a, LwCas13a can robustly cleave a target with A, U, or C PFS, with less activity on the ssRNA with a G PFS. Although we see weaker activity against ssRNA 1 with a G PFS, we still see robust detection for the two target sites with G PFS motifs (Table 3; rs601338 crRNA and Zika targeting crRNA 2). It is likely that the H PFS is not required under every circumstance and that in many cases strong cleavage or collateral activity can be achieved with a G PFS.

### Discussion of Recombinase Polymerase Amplification (RPA) and Other Isothermal Amplification Strategies.

[0605] Recombinase polymerase amplification (RPA) is an isothermal amplification technique consisting of three essential enzymes: a recombinase, single-stranded DNA-binding proteins (SSBs), and a strand displacing polymerase. RPA overcomes many technical difficulties present in other amplification strategies, particularly polymerase chain reaction (PCR), by not requiring temperature regulation as the enzymes all operate at a constant temperature around 37° C. RPA replaces temperature cycling for global melting of the double-stranded template and primer annealing with an enzymatic approach inspired by in vivo DNA replication and repair. Recombinase-primer complexes scan double-stranded DNA and facilitate strand exchange at complementary sites. The strand exchange is stabilized by SSBs, allowing the primer to stay bound. Spontaneous disassembly of the recombinase occurs in its ADP-bound state, allowing a strand-displacing polymerase to invade and extend the primer, allowing amplification without complex instrumentation unavailable in point-of-care and field settings. Cyclic repetition of this process in a temperate range of 37−42° C. results in exponential DNA amplification. The original formulation published uses the Bacillus subtilis Pol I (Bsu) as the strand-displacing polymerase, T4 uvsX as the recombinase, and T4 gp32 as the single-stranded DNA binding protein (2), although it is unclear what components are in the current formulation sold by TwistDx used in this study.

[0606] Additionally, RPA has a number of limitations:

1) Although Cas13a detection is quantitative (FIG. 15), real-time RPA quantitation can be difficult because of its rapid saturation when the recombinase uses all available ATP. While real-time PCR is quantitative because of the ability to cycle amplification, RPA has no mechanism to tightly control the rate of amplification. Certain adjustments can be made to reduce amplification speed, such as reducing available magnesium or primer concentrations, lowering the reaction temperature, or designing inefficient primers. Although we see some instances of quantitative SHERLOCK, such as in FIGS. 31, 32, and 52, it is not always the case and depends on the template.
2) RPA efficiency can be sensitive to primer design. The manufacturer typically recommends designing longer primers to ensure efficient recombinase binding with average GC content (40-60%) and screening up to 100 primer pairs to find highly sensitive primer pairs. We have found with SHERLOCK that we only have to design two primer pairs to achieve an attomolar test with single molecule sensitivity. This robustness is likely due to the additional amplification of signal by constitutively active Cas13a collateral activity that offsets any inefficiencies in amplicon amplification. This quality is particularly important for our bacterial pathogen identification in FIG. 34. Issues were experienced with amplifying highly structured regions such as the 16S rRNA gene sites in bacterial genomes because there is no melting step involved in RPA. Thus, secondary structure in primers becomes an issue, limiting amplification efficiency and thus sensitivity. The embodiments disclosed herein were believd to be successful despite these RPA-specific issues because of additional signal amplification from Cas13a.
3) The amplification sequence length must be short (100-200 bp) for efficient RPA. For most applications, this is not a significant issue and perhaps is even advantageous (e.g. cfDNA detection where average fragment size is 160 bp). Sometimes large amplicon lengths are important, such as when universal primers are desired for bacterial detection and the SNPs for discrimination are spread over a large area.

[0607] SHERLOCK's modularity allows any amplification technique, even non-isothermal approaches, to be used prior to T7 transcription and Cas13a detection. This modularity is enabled by the compatibility of the T7 and Cas13a steps in a single reaction allowing detection to be performed on any amplified DNA input that has a T7 promoter. Prior to using RPA, nucleic acid sequence based amplification (NASBA) (3, 4) was attempted for our detection assay (FIG. 10). However, NASBA did not drastically improve the sensitivity of Cas13a (FIGS. 11 and 53). Other amplification techniques that could be employed prior to detection include PCR, loop mediated isothermal amplification (LAMP) (5), strand displacement amplification (SDA) (6), helicase-dependent amplification (HDA) (7), and nicking enzyme amplification reaction (NEAR) (8). The ability to swap any isothermal technique allows SHERLOCK to overcome the specific limitations of any one amplification technique.

### Design of Engineered Mismatches.

[0608] We previously showed that LshCas13a target cleavage was reduced when there were two or more mismatches in the target:crRNA duplex but was relatively unaffected by single mismatches, an observation we confirmed for LwCas13a collateral cleavage (FIG. 36A). We hypothesized that by introducing an additional mutation in the crRNA spacer sequence, we would destabilize collateral cleavage against a target with an additional mismatch (two mismatches in total) while retaining on-target collateral cleavage, as there would only be a single mismatch. To test the possibility of engineering increased specificity, we designed multiple crRNAs targeting ssRNA 1 and included mismatches across the length of the crRNA (FIG. 36A) to optimize on-target collateral cleavage and minimize collateral cleavage of a target that differs by a single mismatch. We observed that these mismatches did not reduce collateral cleavage of ssRNA 1, but significantly decreased signal for a target that included an additional mismatch (ssRNA 2). The designed crRNA that best distinguished between ssRNA 1 and 2 included synthetic mismatches close to the ssRNA 2 mismatch, in effect creating a “bubble,” or distortion in the hybridized RNA. The loss of sensitivity caused by the coordination of a synthetic mismatch and an additional mismatch present in the target (i.e., a double mismatch) agrees with the sensitivity of LshCas13a and LwCas13a to consecutive or nearby double mismatches and presents a basis for rational design of crRNAs that enable single-nucleotide distinction (FIG. 36B).

[0609] For mismatch detection of ZIKV and DENV strains, our full-length crRNA contained two mismatches (FIG. 37A,B). Due to high sequence divergence between strains, we were unable to find a continuous stretch of 28 nt with only a single nucleotide difference between the two genomes. However, we predicted that shorter crRNAs would still be functional, and designed shorter 23 nt crRNAs against targets in the two ZIKV strains that included a synthetic mismatch in the spacer sequence and only one mismatch in the target sequence. These crRNAs could still distinguish African and American strains of ZIKV (FIG. 36C). Subsequent testing of 23 nt and 20 nt crRNA show that reductions of spacer length reduce activity but maintain or enhance the ability to discriminate single mismatches (FIG. 57A-G). To better understand how synthetic mismatches may be introduced to facilitate single-nucleotide mutation discrimination, we tiled the synthetic mismatch across the first seven positions of the spacer at three different spacer lengths: 28, 23, and 20 nt (FIG. 57A). On a target with a mutation at the third position, LwCas13a shows maximal specificity when the synthetic mismatch is in position 5 of the spacer, with improved specificity at shorter spacer lengths, albeit with lower levels of on-target activity (FIG. 57B-G). We also shifted the target mutation across positions 3-6 and tiled synthetic mismatches in the spacer around the mutation (FIG. 58).

Genotyping with SHERLOCK Using Synthetic Standards.

[0610] Evaluation of synthetic standards created from PCR amplification of the SNP loci allows for accurate identification of genotypes (FIG. 60A,B). By computing all comparisons (ANOVA) between the SHERLOCK results of an individual's sample and the synthetic standards, each individual's genotype can be identified by finding the synthetic standard that has the most similar SHERLOCK detection intensity (FIG. 60C,D). This SHERLOCK genotyping approach is generalizable to any SNP locus (FIG. 60E).

### SHERLOCK is an Affordable, Adaptable CRISPR-Dx Platform.

[0611] For the cost analysis of SHERLOCK, reagents determined to be of negligible cost were omitted, including DNA templates for the synthesis of crRNA, primers used in RPA, common buffers (MgCl2, Tris HCl, glycerol, NaCl, DTT), glass microfiber filter paper, and RNAsecure reagent. For DNA templates, ultramer synthesis from IDT provides material for 40 in vitro transcription reactions (each being enough for ˜10,000 reactions) for ˜$70, adding negligible cost to crRNA synthesis. For RPA primers, a 25 nmole IDT synthesis of a 30 nt DNA primer can be purchased for ˜$10, providing material adequate for 5000 SHERLOCK reactions. Glass microfiber paper is available for $0.50/sheet, which is sufficient for several hundred SHERLOCK reactions. 4% RNAsecure reagent costs $7.20/mL, which is sufficient for 500 tests.

[0612] In addition, for all experiments, except the paper-based assays, 384-well plates were used (Corning 3544), at the cost of $0.036/reaction. Because of the negligible cost, this was not included in the overall cost analysis. Additionally, SHERLOCK-POC does not require the use of a plastic vessel, as it can easily be performed on paper. The readout method for SHERLOCK used herein was a plate reader equipped with either a filter set or a monochromator. As a capital investment, the cost of the reader was not included in the calculation, as the cost precipitously decreases as more reactions are run on the instrument and is negligible. For POC applications, cheaper and portable alternatives could be used, such as hand-held spectrophotometers (9) or portable electronic readers (4), which reduce the cost of instrumentation to <$200. While these more portable solutions will reduce the speed and ease of readout as compared to bulkier instruments, they allow for more broad use.

### Results

[0613] The assay and systems described herein may generally comprise a two-step process of amplification and detection. During the first step, the nucleic acid sample, either RNA or DNA, is amplified, for example by isothermal amplification. During the second step, the amplified DNA is transcribed into RNA and subsequently incubated with a CRISPR effector, such as C2c2, and a crRNA programmed to detect the presence of the target nucleic acid sequence. To enable detection, a reporter RNA that has been labeled with a quenched fluorophore is added to the reaction. Collateral cleavage of the reporter RNA results in un-quenching of the fluorophore and allows for real-time detection of the nucleic acid target (FIG. 17A).

[0614] To achieve robust signal detection, an ortholog of C2c2 was identified from the organism Leptotrichia wadei (LwC2c2) and evaluated. The activity of the LwC2c2 protein was evaluated by expressing it along with a synthetic CRISPR array in E. coli and programming it to cleave a target site within the beta-lactamase mRNA, which leads to death of the bacteria under ampicillin selection (FIG. 2B). Fewer surviving E. coli colonies were observed with the LwC2c2 locus than with the LshC2c2 locus, demonstrating a higher cleavage activity of the LwC2c2 ortholog (FIG. 2C). The human-codon optimized LwC2c2 protein was then purified from E. coli (FIG. 2D-E) and its ability to cleave a 173-nt ssRNA assayed with different protospacer flanking site (PFS) nucleotides (FIG. 2F). LwC2c2 was able to cleave each of the possible four PFS targets, with slightly less activity on the ssRNA with a G PFS.

[0615] Real-time measurement of LwC2c2 RNase collateral activity was measured using a commercially available RNA fluorescent plate reader (FIG. 17A). To determine the baseline sensitivity of LwC2c2 activity, LwC2c2 was incubated with ssRNA target 1 (ssRNA 1) and a crRNA that is complementary to a site within the ssRNA target, along with the RNA sensor probe (FIG. 18). This yielded a sensitivity of ˜50 fM (FIG. 27A), which, although more sensitive than other recent nucleic acid detection technologies (Pardee et al., 2014), is not sensitive enough for many diagnostic applications which require sub-femtomolar detection performance (Barletta et al., 2004; Emmadi et al., 2011; Rissin et al., 2010; Song et al., 2013).

[0616] To increase sensitivity, an isothermal amplification step was added prior to incubation with LwC2c2. Coupling LwC2c2-mediated detection with previously used isothermal amplification approaches such as nucleic acid sequence based amplification (NASBA)(Compton, 1991; Pardee et al., 2016) improved sensitivity to a certain extent (FIG. 11). An alternative isothermal amplification approach, recombinase polymerase amplification (RPA) (Piepenburg et al., 2006), was tested which can be used to amplify DNA exponentially in under two hours. By adding a T7 RNA polymerase promoter onto the RPA primers, amplified DNA can be converted to RNA for subsequent detection by LwC2c2 (FIG. 17). Thus, in certain example embodiments, the assay comprises the combination of amplification by RPA, T7 RNA polymerase conversion of DNA to RNA, and subsequent detection of the RNA by C2c2 unlocking of fluorescence from a quenched reporter.

[0617] Using the example method on a synthesized DNA version of ssRNA 1, it was possible to achieve attomolar sensitivity in the range of 1-10 molecules per reaction (FIG. 27B, left). In order to verify the accuracy of detection, the concentration of input DNA was qualified with digital-droplet PCR and confirmed that the lowest detectable target concentration (2 aM) was at a concentration of a single molecule per microliter. With the addition of a reverse transcription step, RPA can also amplify RNA into a dsDNA form, allowing us attomolar sensitivity on ssRNA 1 to be achieved (27B, right). Similarly, the concentrations of RNA targets were confirmed by digital-droplet PCR. To evaluate the viability of the example method to function as a POC diagnostic test, the ability of all components—RPA, T7 polymerase amplification, and LwC2c2 detection—to function in a single reaction were tested and found attomolar sensitivity with a one-pot version of the assay (FIG. 22).

### The Assay is Capable of Sensitive Viral Detection in Liquid or on Paper

[0618] It was next determined whether the assay would be effective in infectious disease applications that require high sensitivity and could benefit from a portable diagnostic. To test detection in a model system, lentiviruses harboring RNA fragments of the Zika virus genome and the related flavivirus Dengue (Dejnirattisai et al., 2016) were produced and the number of viral particles quantified (FIG. 31A). Levels of mock virus were detected down to 2 aM. At the same time, it was also possible to show clear discrimination between these proxy viruses containing Zika and Dengue RNA fragments (FIG. 31B). To determine whether the assay would be compatible with freeze-drying to remove dependence on cold chains for distribution, the reaction components were freeze-dried. After using the sample to rehydrate the lyophilized components, 20 fM of ssRNA 1 was detected (FIG. 33A). Because resource-poor and POC settings would benefit from a paper test for ease of usability, the activity of C2c2 detection on glass fiber paper was also evaluated and found that a paper-spotted C2c2 reaction was capable of target detection (FIG. 33B). In combination, freeze-drying and paper-spotting the C2c2 detection reaction resulted in sensitive detection of ssRNA 1 (FIG. 33C). Similar levels of sensitivity were also observed for detection of a synthetic Zika viral RNA fragment between LwC2c2 in solution and freeze-dried LwC2c2, demonstrating the robustness of freeze-dried SHERLOCK and the potential for a rapid, POC Zika virus diagnostic (FIG. 33D-E). Toward this end, the ability of the POC variant of the assay was tested to determine the ability to discriminate Zika RNA from Dengue RNA (FIG. 31C). While paper-spotting and lyophilization slightly reduced the absolute signal of the readout, the assay still significantly detected mock Zika virus at concentrations as low as 20 aM (FIG. 31D), compared to detection of mock virus with the Dengue control sequence.

[0619] Zika viral RNA levels in humans have been reported to be as low as 3×106 copies/mL (4.9 fM) in patient saliva and 7.2×105 copies/mL (1.2 fM) in patient serum (Barzon et al., 2016; Gourinat et al., 2015; Lanciotti et al., 2008). From obtained patient samples, concentrations as low as 1.25×103 copies/mL (2.1 aM) were observed. To evaluate whether the assay is capable of Zika virus detection of low-titer clinical isolates, viral RNA was extracted from patients and reverse transcribed and the resulting cDNA was used as input for the assay (FIG. 32A). Significant detection for the Zika human serum samples was observed at concentrations down to 1.25 copy/uL (2.1 aM) (FIG. 32B). Furthermore, signal from patient samples was predictive of Zika viral RNA copy number and could be used to predict viral load (FIG. 31F). To test broad applicability for disease situations where nucleic acid purification is unavailable, detection of ssRNA 1 spiked into human serum was tested, and it was determined that the assay was activated at serum levels below 2% (FIG. 33G).

### Bacterial Pathogen Distinction and Gene Distinction

[0620] To determine if the assay could be used to distinguish bacterial pathogens, the 16S V3 region was selected as an initial target, as the conserved flanking regions allow universal RPA primers to be used across bacterial species, and the variable internal region allowing for differentiation of species. A panel of 5 possible targeting crRNAs were designed for pathogenic strains and isolated E. coli and Pseudomonas aeruginosa gDNA (FIG. 34A). The assay was capable of distinguishing E. coli or P. aeruginosa gDNA and showed low background signal for crRNAs of other species (FIG. 34 A,B).

[0621] The assay can also be adapted to rapidly detect and distinguish bacterial genes of interest, such as antibiotic-resistance genes. Carbapenem-resistant enterobacteria (CRE) are a significant emerging public health challenge (Gupta et al., 2011). The ability of the assay to detect carbapenem-resistance genes was evaluated, and if the test could distinguish between different carbapenem-resistance genes. Klebsiella pneumonia was obtained from clinical isolates harboring either Klebsiella pneumoniae carbapenemase (KPC) or New Delhi metallo-beta-lactamase 1 (NDM-1) resistance genes and designed crRNAs to distinguish between the genes. All CRE had significant signal over bacteria lacking these resistance genes (FIG. 35A) and that we could significantly distinguish between KPC and NDM-1 strains of resistance (FIG. 35B).

### Single-Base Mismatch Specificity of CRISPR RNA-Guided RNases

[0622] It has been shown that certain CRISPR RNA-guided RNase orthologues, such as LshC2c2, do not readily distinguish single-base mismatches. (Abudayyeh et al., 2016). As demonstrated herein, LwC2c2 also shares this feature (FIG. 37A). To increase the specificity of LwC2c2 cleavage, a system for introducing synthetic mismatches in the crRNA:target duplex was developed that increases the total sensitivity to mismatches and enables single-base mismatch sensitivity. Multiple crRNAs for target 1 were designed and included mismatches across the length of the crRNA (FIG. 37A) to optimize on-target cleavage and minimize cleavage of a target that differs by a single mismatch. These mismatches did not reduce cleavage efficiency of ssRNA target 1, but significantly decreased signal for a target that included an additional mismatch (ssRNA target 2). The designed crRNA that best distinguished between targets 1 and 2 included synthetic mismatches close to the target 2 mismatch, in effect creating a “bubble.” The loss of sensitivity caused by the coordination of a synthetic mismatch and an additional mismatch present in the target (i.e., a double mismatch) agrees with the sensitivity of LshC2c2 to consecutive or nearby double mismatches (Abudayyeh et al., 2016) and presents a format for rational design of crRNAs that enable single-nucleotide distinction (FIG. 37B).

[0623] Having demonstrated that C2c2 can be engineered to recognize single-base mismatches, it was determined whether this engineered specificity could be used to distinguish between closely related viral pathogens. Multiple crRNAs were designed to detect either the African or American strains of Zika virus (FIG. 37A) and either strain 1 or 3 of Dengue virus (FIG. 37C). These crRNAs included a synthetic mismatch in the spacer sequence, causing a single bubble to form when duplexed to the on-target strain due to the synthetic mismatch. However, when the synthetic mismatch spacer is duplexed to the off-target strain two bubbles form due to the synthetic mismatch and the SNP mismatch. The synthetic mismatch crRNAs detected their corresponding strains with significantly higher signal than the off-target strain allowing for robust strain distinction (FIG. 37B, 37D). Due to the significant sequence similarity between strains, it was not possible to find a continuous stretch of 28 nt with only a single nucleotide difference between the two genomes in order to demonstrate true single-nucleotide strain distinction. However, it was predicted that shorter crRNAs would still be functional, as they are with LshC2c2 (Abudayyeh et al., 2016), and accordingly shorter 23-nt crRNAs were designed against targets in the two Zika strains that included a synthetic mismatch in the spacer sequence and only one mismatch in the target sequence. These crRNAs were still capable of distinguishing the African and American strains of Zika with high sensitivity (FIG. 36C).

Rapid Genotyping Using DNA Purified from Saliva

[0624] Rapid genotyping from human saliva could be useful in emergency pharmacogenomic situations or for at-home diagnostics. To demonstrate the potential of the embodiments disclosed herein for genotyping, five loci were chosen to benchmark C2c2 detection using 23andMe genotyping data as the gold standard (Eriksson et al., 2010) (FIG. 38A). The five loci span a broad range of functional associations, including sensitivity to drugs, such as statins or acetaminophen, norovirus susceptibility, and risk of heart disease (Table 15).

TABLE 15
SNP Variants tested

| ID | Gene | Category |
|---|---|---|
| rs5082 | APOA2 | Saturated fat consumption and weight gain |
| rs1467558 | CD44 | Acetaminophen metabolism |
| rs2952768 | near CREB1 | morphine dependence |
| rs4363657 | SLCO1B1 | 4.5x increase myopathy risk for statin users |
| rs601338 | FUT2 | resistance to norovirus |

[0625] Saliva from four human subjects was collected and the genomic DNA purified using a simple commercial kit in less than an hour. The four subjects had a diverse set of genotypes across the five loci, providing a wide enough sample space for which to benchmark the assay for genotyping. For each of the five SNP loci, a subject's genomic DNA was amplified using RPA with the appropriate primers followed by detection with LwC2c2 and pairs of crRNAs designed to specifically detect one of the two possible alleles (FIG. 38B). The assay was specific enough to distinguish alleles with high significance and to infer both homozygous and heterozygous genotypes. Because a DNA extraction protocol was performed on the saliva prior to detection, the assay was tested to determine if it could be made even more amenable for POC genotyping by using saliva heated to 95° C. for 5 minutes without any further extraction. The assay was capable of correctly genotyping two patients whose saliva was only subjected to heating for 5 minutes and then subsequent amplification and C2c2 detection (FIG. 40B).

Detection of Cancerous Mutations in cfDNA at Low-Allelic Fractions

[0626] Because the assay is highly specific to single nucleotide differences in targets, a test was devised to determine if the assay was sensitive enough to detect cancer mutations in cell-free DNA (cfDNA). cfDNA fragments are small percentage (0.1% to 5%) of wild-type cfDNA fragments (Bettegowda et al., 2014; Newman et al., 2014; Olmedillas Lopez et al., 2016; Qin et al., 2016). A significant challenge in the cfDNA field is detecting these mutations because they are typically difficult to discover given the high levels of non-mutated DNA found in the background in blood (Bettegowda et al., 2014; Newman et al., 2014; Qin et al., 2016). A POC cfDNA cancer test would also be useful for regular screening of cancer presence, especially for patients at risk for remission.

[0627] The assay's ability to detect mutant DNA in wild-type background was determined by diluting dsDNA target 1 in a background of ssDNA1 with a single mutation in the crRNA target site (FIG. 41A-B). LwC2c2 was capable of sensing dsDNA 1 to levels as low as 0.1% of the background dsDNA and within attomolar concentrations of dsDNA 1. This result shows that LwC2c2 cleavage of background mutant dsDNA 1 is low enough to allow robust detection of the on-target dsDNA at 0.1% allelic fraction. At levels lower than 0.1%, background activity is likely an issue, preventing any further significant detection of the correct target.

[0628] Because the assay could sense synthetic targets with allelic fractions in a clinically relevant range, it was evaluated whether the assay was capable of detecting cancer mutations in cfDNA. RPA primers to two different cancer mutations, EGFR L858R and BRAF V600E, were designed and commercial cfDNA standards were used with allelic fractions of 5%, 1%, and 0.1% that resemble actual human cfDNA samples to test. Using a pair of crRNAs that could distinguish the mutant allele from the wild-type allele (FIG. 38C), detection of the 0.1% allelic fraction for both of the mutant loci was achieved (FIG. 39 A-B).

### Discussion

[0629] By combining the natural properties of C2c2 with isothermal amplification and a quenched fluorescent probe, the assay and systems disclosed herein have been demonstrated as a versatile, robust method to detect RNA and DNA, and suitable for a variety of rapid diagnoses including infectious disease applications and rapid genotyping. A major advantage of the assays and systems disclosed herein is that a new POC test can be redesigned and synthesized in a matter of days for as low as $0.6/test.

[0630] Because many human disease applications require the ability to detect single mismatches a rational approach was developed to engineer crRNAs to be highly specific to a single mismatch in the target sequence by introducing a synthetic mismatch in the spacer sequence of the crRNA. Other approaches for achieving specificity with CRISPR effectors rely on screening-based methods over dozens of guide designs (Chavez et al., 2016). Using designed mismatch crRNAs, discrimination of Zika and Dengue viral strains in sites that differ by a single mismatch, rapid genotyping of SNPs from human saliva gDNA, and detection of cancer mutations in cfDNA samples, was demonstrated.

[0631] The low cost and adaptability of the assay platform lends itself to further applications including (i) general RNA/DNA quantitation experience in substitute of specific qPCR assays, such as Taqman, (ii) rapid, multiplexed RNA expression detection resembling microarrays, and (iii) other sensitive detection applications, such as detection of nucleic acid contamination from other sources in food. Additionally, C2c2 could potentially be used for detection of transcripts within biological settings, such as in cells, and given the highly specific nature of C2c2 detection, it may be possible to track allelic specific expression of transcripts or disease-associated mutations in live cells. With the wide availability of aptamers, it might also be possible to sense proteins by coupling the detection of protein by an aptamer to the revealing of a cryptic amplification site for RPA followed by C2c2 detection.

Nucleic Acid Detection with CRISPR-Cas13a/C2c2: Attomolar Sensitivity and Single Nucleotide Specificity

[0632] To achieve robust signal detection, we identified an ortholog of Cas13a from Leptotrichia wadei (LwCas13a), which displays greater RNA-guided RNase activity relative to Leptotrichia shahii Cas13a (LshCas13a) (10) (FIG. 2, see also above “Characterization of LwCas13a cleavage requirements”). LwCas13a incubated with ssRNA target 1 (ssRNA 1), crRNA, and reporter (quenched fluorescent RNA) (FIG. 18) (13) yielded a detection sensitivity of ˜50 fM (FIG. 51, 15), which is not sensitive enough for many diagnostic applications (12, 14-16). We therefore explored combining Cas13a-based detection with different isothermal amplification steps (FIG. 10, 11, 53, 16) (17, 18). Of the methods explored, recombinase polymerase amplification (RPA) (18) afforded the greatest sensitivity and can be coupled with T7 transcription to convert amplified DNA to RNA for subsequent detection by LwCas13a (see also above “Discussion of Recombinase Polymerase Amplification (RPA) and other isothermal amplification strategies.”). We refer to this combination of amplification by RPA, T7 RNA polymerase transcription of amplified DNA to RNA, and detection of target RNA by Cas13a collateral RNA cleavage-mediated release of reporter signal as SHERLOCK.

[0633] We first determined the sensitivity of SHERLOCK for detection of RNA (when coupled with reverse transcription) or DNA targets. We achieved single molecule sensitivity for both RNA and DNA, as verified by digital-droplet PCR (ddPCR) (FIG. 27, 51, 54A,B). Attomolar sensitivity was maintained when we combined all SHERLOCK components in a single reaction, demonstrating the viability of this platform as a point-of-care (POC) diagnostic (FIG. 54C). SHERLOCK has similar levels of sensitivity as ddPCR and quantitative PCR (qPCR), two established sensitive nucleic acid detection approaches, whereas RPA alone was not sensitive enough to detect low levels of target (FIG. 55A-D). Moreover, SHERLOCK shows less variation than ddPCR, qPCR, and RPA, as measured by the coefficient of variation across replicates (FIG. 55E-F).

[0634] We next examined whether SHERLOCK would be effective in infectious disease applications that require high sensitivity. We produced lentiviruses harboring genome fragments of either Zika virus (ZIKV) or the related flavivirus Dengue (DENV) (19) (FIG. 31A). SHERLOCK detected viral particles down to 2 aM and could discriminate between ZIKV and DENV (FIG. 31B). To explore the potential use of SHERLOCK in the field, we first demonstrated that Cas13acrRNA complexes lyophilized and subsequently rehydrated (20) could detect 20 fM of nonamplified ssRNA 1 (FIG. 33A) and that target detection was also possible on glass fiber paper (FIG. 33B). The other components of SHERLOCK are also amenable to freeze-drying: RPA is provided as a lyophilized reagent at ambient temperature, and we previously demonstrated that T7 polymerase tolerates freeze-drying (2). In combination, freeze-drying and paper-spotting the Cas13a detection reaction resulted in comparable levels of sensitive detection of ssRNA 1 as aqueous reactions (FIG. 33C-E). Although paper-spotting and lyophilization slightly reduced the absolute signal of the readout, SHERLOCK (FIG. 31C) could readily detect mock ZIKV virus at concentrations as low as 20 aM (FIG. 31D). SHERLOCK is also able to detect ZIKV in clinical isolates (serum, urine, or saliva) where titers can be as low as 2×103 copies/mL (3.2 aM) (21). ZIKV RNA extracted from patient serum or urine samples and reverse transcribed into cDNA (FIGS. 32E and 52A) could be detected at concentrations down to 1.25×103 copies/mL (2.1 aM), as verified by qPCR (FIGS. 32F and 52B). Furthermore, the signal from patient samples was predictive of ZIKV RNA copy number and could be used to predict viral load (FIG. 33F). To simulate sample detection without nucleic acid purification, we measured detection of ssRNA 1 spiked into human serum, and found that Cas13a could detect RNA in reactions containing as much as 2% serum (FIG. 33G). Another important epidemiological application for CRISPR-dx is the identification of bacterial pathogens and detection of specific bacterial genes. We targeted the 16S rRNA gene V3 region, where conserved flanking regions allow universal RPA primers to be used across bacterial species and the variable internal region allows for differentiation of species. In a panel of five possible targeting crRNAs for different pathogenic strains and gDNA isolated from E. coli and Pseudomonas aeruginosa (FIG. 34A), SHERLOCK correctly genotyped strains and showed low cross-reactivity (FIG. 34B). Additionally, we were able to use SHERLOCK to distinguish between clinical isolates of Klebsiella pneumoniae with two different resistance genes: Klebsiella pneumoniae carbapenemase (KPC) and New Delhi metallo-beta-lactamase 1 (NDM-1) (22) (FIG. 56).

[0635] To increase the specificity of SHERLOCK, we introduced synthetic mismatches in the crRNA:target duplex that enable LwCas13a to discriminate between targets that differ by a single-base mismatch (FIG. 36A,B; see also above “Design of engineered mismatches”). We designed multiple crRNAs with synthetic mismatches in the spacer sequences to detect either the African or American strains of ZIKV (FIG. 37A) and strain 1 or 3 of DENV (FIG. 37C). Synthetic mismatch crRNAs detected their corresponding strains with significantly higher signal (two-tailed Student t-test; p<0.01) than the off-target strain, allowing for robust strain discrimination based off single mismatches (FIG. 37B,D, 36C). Further characterization revealed that Cas13a detection achieves maximal specificity while maintaining on-target sensitivity when a mutation is in position 3 of the spacer and the synthetic mismatch is in position 5 (FIGS. 57 and 58). The ability to detect single-base differences opens the opportunity of using SHERLOCK for rapid human genotyping. We chose five loci spanning a range of health-related single-nucleotide polymorphisms (SNPs) (Table 1) and benchmarked SHERLOCK detection using 23andMe genotyping data as the gold standard at these SNPs (23) (FIG. 38A). We collected saliva from four human subjects with diverse genotypes across the loci of interest, and extracted genomic DNA either through commercial column purification or direct heating for five minutes (20). SHERLOCK distinguished alleles with high significance and with enough specificity to infer both homozygous and heterozygous genotypes (FIG. 38B, 40, 59, 60; see also above “Genotyping with SHERLOCK using synthetic standards”). Finally, we sought to determine if SHERLOCK could detect low frequency cancer mutations in cell free (cf) DNA fragments, which is challenging because of the high levels of wild-type DNA in patient blood (24-26). We first found that SHERLOCK could detect ssDNA 1 at attomolar concentrations diluted in a background of genomic DNA (FIG. 61). Next, we found that SHERLOCK was also able to detect single nucleotide polymorphism (SNP)-containing alleles (FIG. 41A,B) at levels as low as 0.1% of background DNA, which is in the clinically relevant range. We then demonstrated that SHERLOCK could detect two different cancer mutations, EGFR L858R and BRAF V600E, in mock cfDNA samples with allelic fractions as low as 0.1% (FIG. 38,39) (20).

[0636] The SHERLOCK platform lends itself to further applications including (i) general RNA/DNA quantitation in lieu of specific qPCR assays, such as TaqMan, (ii) rapid, multiplexed RNA expression detection, and (iii) other sensitive detection applications, such as detection of nucleic acid contamination. Additionally, Cas13a could potentially detect transcripts within biological settings and track allele-specific expression of transcripts or disease-associated mutations in live cells. We have shown that SHERLOCK is a versatile, robust method to detect RNA and DNA, suitable for rapid diagnoses including infectious disease applications and sensitive genotyping. A SHERLOCK paper test can be redesigned and synthesized in a matter of days for as low as $0.61/test (see also above “SHERLOCK is an affordable, adaptable CRISPR-Dx platform”) with confidence, as almost every crRNA tested resulted in high sensitivity and specificity. These qualities highlight the power of CRISPR-Dx and open new avenues for rapid, robust and sensitive detection of biological molecules.

TABLE 16
RPA Primers used

| Name | Sequence | 1st Fig. |
|---|---|---|
| RP0683 - RPA | AATTCTAATACGACTCACTATAGGGATCCTCTAGAA | FIG. 27B |
| ssDNA/ssRNA 1 F | ATATGGATTACTTGGTAGAACAG (SEQ. I.D. No. 18) | |
| RP0684 - RPA | GATAAACACAGGAAACAGCTATGACCATGATTACG | FIG. 27B |
| ssDNA/ssRNA 1 R | (SEQ. I.D. No. 19) | |
| AMPL-25 Zika 8B | AAT TCT AAT ACG ACT CAC TAT | FIG. 31B |
| long-rpa3-f | AGGCCGCTGCTAATGATAGGTTGCTACTCACAA | |
| | (SEQ. I.D. No. 20) | |
| AMPL-26 Zika 8B | TCAATGTCAGTCACCACTATTCCATCCACAACAG | FIG. 31B |
| long-rpa3-r | (SEQ. I.D. No. 21) | |
| RP819 - zika | gaaatTAATACGACTCACTATAGGGCGTGGCGCACTAC | FIG. 31C |
| region 8 F | ATGTACT (SEQ. I.D. No. 22) | |
| RP821 - zika | TGTCAATGTCAGTCACCACTATTCCATCCA | FIG. 31C |
| region 8 R | (SEQ. I.D. No. 23) | |
| 517 bacterial | AATTCTAATACGACTCACTATAGGGtccaGACTCCTAC | FIG. 34B |
| V3 F | GGGAGGCWGCA (SEQ. I.D. No. 24) | |
| RP758 bacterial | TTTCGCTCTATTCTCATCAGTTTCATGTCCTGTGTCA | FIG. 34B |
| V3 R | TTACCGCGGCTGCTG (SEQ. I.D. No. 25) | |
| wR0074 A2 | GGTACACTTCAGGTATATTTGAGGTTCATTC | FIG. 38B |
| rs5082 F | (SEQ. I.D. No. 26) | |
| wR0074 E2 | gaaattaatacgactcactatagggGTTGATATGTCAGAGCTTTCC | FIG. 38B |
| rs5082 R | AGAGAAATAA (SEQ. I.D. No. 27) | |
| wR0074 A4 | ACACTAATATTGATTCCTTCAGATATGGACT | FIG. 38B |
| rs1467558 F | (SEQ. I.D. No. 28) | |
| wR0074 E4 | gaaattaatacgactcactatagggATCGTTATTCTTACGCGTTGT | FIG. 38B |
| rs1467558 R | CATTGAAAG (SEQ. I.D. No. 29) | |
| wR0074 A5 | GAATCTCTTGAACCCAGTAGGCAGAGGTTG | FIG. 38B |
| rs2952768 F | (SEQ. I.D. No. 30) | |
| wR0074 E5 | gaaattaatacgactcactatagggAAAGGCCTAAGTGTCCTTCTA | FIG. 38B |
| rs2952768 R | CCATTATTTTG (SEQ. I.D. No. 31) | |
| wR0074 A9 | TTTGTTTTTGATGTTGTTGTTGTTTTTGTGTC | FIG. 38B |
| rs4363657 F | (SEQ. I.D. No. 32) | |
| wR0074 E9 | gaaattaatacgactcactatagggAATGCATTCATAGCCAAATTC | FIG. 38B |
| rs4363657 R | TACTGGAAATA (SEQ. I.D. No. 33) | |
| wR0074 A11 | GAGTACGTCCGCTTCACCGGCTACCCCTGCTC | FIG. 38B |
| rs601338 F | (SEQ. I.D. No. 34) | |
| wR0074 E11 | gaaattaatacgactcactatagggATAGTCCCCTCGGCGAACATG | FIG. 38B |
| rs601338 R | GACCCCTACAA (SEQ. I.D. No. 35) | |
| RP824 BRAFV600E | gaaatTAATACGACTCACTATAGGGTCATGAAGACCTC | FIG. 39A |
| cfDNA F | ACAGTAAAAATAGGTGATT (SEQ. I.D. No. 36) | |
| RP769 BRAFV600E | ATTCTTACCATCCACAAAATGGATCCAGACAA | FIG. 39A |
| cfDNA R | (SEQ. I.D. No. 37) | |
| RP826 EGFR858R | gaaatTAATACGACTCACTATAGGGGCAGCATGTCAA | FIG. 39B |
| cfDNA F | GATCACAGATTTTGGG (SEQ. I.D. No. 38) | |
| RP804 EGFR858R | CCTCCTTCTGCATGGTATTCTTTCTCTTC | FIG. 39B |
| cfDNA R | (SEQ. I.D. No. 39) | |
| AMPL-31 T1- | AAT TCT AAT ACG ACT CAC TAT | FIG. 11 |
| nasba1-f | AGGGGGATCCTCTAGAAATATGGATT | |
| | (SEQ. I.D. No. 40) | |
| AMPL-32 T1- | CTCGTATGTTGTGTGGAATTGT | FIG. 11 |
| nasba1-r | (SEQ. I.D. No. 41) | |
| AMPL-33 T1- | AAT TCT AAT ACG ACT CAC TAT | FIG. 11 |
| nasba2-f | AGGGGGATCCTCTAGAAATATGGATTAC | |
| | (SEQ. I.D. No. 42) | |
| AMPL-34 T1- | AAACACAGGAAACAGCTATGAC | FIG. 11 |
| nasba2-r | (SEQ. I.D. No. 43) | |
| AMPL-35 T1- | AAT TCT AAT ACG ACT CAC TAT | FIG. 11 |
| nasba3-f | AGGCCTCTAGAAATATGGATTACTTGGT | |
| | (SEQ. I.D. No. 44) | |
| AMPL-36 T1- | CGTATGTTGTGTGGAATTGTGA | FIG. 11 |
| nasba3-r | (SEQ. I.D. No. 45) | |
| wR0075 A1 | gaaattaatacgactcactatagggCTGTCTTGTCTCTCATGGCCG | FIG. 35A |
| KPC F | CTGGCTGGCTTTTC (SEQ. I.D. No. 46) | |
| wR0075 B1 | CGTACACACCGATGGAGCCGCCAAAGTCCTGTT | FIG. 35A |
| KPC R | (SEQ. I.D. No. 47) | |
| wR0075 A3 | gaaattaatacgactcactatagggAGCAAATGGAAACTGGCGAC | FIG. 35A |
| NDM F | CAACGGTTTGGCGAT (SEQ. I.D. No. 48) | |
| wR0075 B3 | ACTGCCCCGAAACCCGGCATGTCGAGATAGGA | FIG. 35A |
| NDM R | (SEQ. I.D. No. 49) | |

TABLE 17
crRNA sequences used

| | Complete crRNA | | | |
|---|---|---|---|---|
| Name | sequence | Spacer sequence | 1st Fig. | PFS |
| Target 1 crRNA | (SEQ. I.D. No. 50) | (SEQ. I.D. No. 51) | FIG. 2F | C |
| Zika targeting crRNA 1 | (SEQ. I.D. No. 52) | (SEQ. I.D. No. 53) | FIG. 31A | U |
| Zika targeting crRNA 2 | (SEQ. I.D. No. 54) | (SEQ. I.D. No. 55) | FIG. 33D | G |
| E. coli detection crRNA | (SEQ. I.D. No. 56) | (SEQ. I.D. No. 57) | FIG. 22B | U |
| K. pneumoniae detection | (SEQ. I.D. No. 58) | (SEQ. I.D. No. 59) | FIG. 34B | U |
| crRNA | | | | |
| P. aeruginosa detection | (SEQ. I.D. No. 60) | (SEQ. I.D. No. 61) | FIG. 34B | U |
| crRNA | | | | |
| M. tuberculosis detection | (SEQ. I.D. No. 62) | (SEQ. I.D. No. 63) | FIG. 34B | U |
| crRNA | | | | |
| S. aureus detection crRNA | (SEQ. I.D. No. 64) | (SEQ. I.D. No. 65) | FIG. 34B | G |
| KPC crRNA | (SEQ. I.D. No. 66) | (SEQ. I.D. No. 67) | FIG. 35A | U |
| NDM crRNA | (SEQ. I.D. No. 68) | (SEQ. I.D. No. 69) | FIG. 35A | C |
| mismatch crRNA 1 | (SEQ. I.D. No. 70) | (SEQ. I.D. No. 71) | FIG. 36A | C |
| mismatch crRNA 2 | (SEQ. I.D. No. 72) | (SEQ. I.D. No. 73) | FIG. 36A | C |
| mismatch crRNA 3 | (SEQ. I.D. No. 74) | (SEQ. I.D. No. 75) | FIG. 36A | C |
| mismatch crRNA 4 | (SEQ. I.D. No. 76) | (SEQ. I.D. No. 77) | FIG. 36A | C |
| mismatch crRNA 5 | (SEQ. I.D. No. 78) | (SEQ. I.D. No. 79) | FIG. 36A | C |
| mismatch crRNA 6 | (SEQ. I.D. No. 80) | (SEQ. I.D. No. 81) | FIG. 36A | C |
| mismatch crRNA 7 | (SEQ. I.D. No. 82) | (SEQ. I.D. No. 83) | FIG. 36A | C |
| mismatch crRNA 8 | (SEQ. I.D. No. 84) | (SEQ. I.D. No. 85) | FIG. 36A | C |
| mismatch crRNA 9 | (SEQ. I.D. No. 86) | (SEQ. I.D. No. 87) | FIG. 36A | C |
| mismatch crRNA 10 | (SEQ. I.D. No. 88) | (SEQ. I.D. No. 89) | FIG. 36A | C |
| African crRNA 1 | (SEQ. I.D. No. 90) | (SEQ. I.D. No. 91) | FIG. 38A | C |
| African crRNA 2 | (SEQ. I.D. No. 92) | (SEQ. I.D. No. 93) | FIG. 38A | C |
| American crRNA 1 | (SEQ. I.D. No. 94) | (SEQ. I.D. No. 95) | FIG. 38A | U |
| American crRNA 2 | (SEQ. I.D. No. 96) | (SEQ. I.D. No. 97) | FIG. 38A | U |
| Dengue strain 3 crRNA 1 | (SEQ. I.D. No. 98) | (SEQ. I.D. No. 99) | FIG. 38C | A |
| Dengue strain 3 crRNA 2 | (SEQ. I.D. No. 100) | (SEQ. I.D. No. 101) | FIG. 38C | A |
| Dengue strain 1 crRNA 1 | (SEQ. I.D. No. 102) | (SEQ. I.D. No. 103) | FIG. 38C | A |
| Dengue strain 1 crRNA 2 | (SEQ. I.D. No. 104) | (SEQ. I.D. No. 105) | FIG. 38C | A |
| Shorter African crRNA 1 | (SEQ. I.D. No. 106) | (SEQ. I.D. No. 107) | FIG. 36C | C |
| Shorter African crRNA 2 | (SEQ. I.D. No. 108) | (SEQ. I.D. No. 109) | FIG. 36C | C |
| Shorter American crRNA 1 | (SEQ. I.D. No. 110) | (SEQ. I.D. No. 111) | FIG. 36C | U |
| Shorter American crRNA 2 | (SEQ. I.D. No. 112) | (SEQ. I.D. No. 113) | FIG. 36C | U |
| rs1467558 crRNA C | (SEQ. I.D. No. 114) | (SEQ. I.D. No. 115) | FIG. 38B | C |
| rs1467558 crRNA T | (SEQ. I.D. No. 116) | (SEQ. I.D. No. 117) | FIG. 38B | C |
| rs2952768 crRNA C | (SEQ. I.D. No. 118) | (SEQ. I.D. No. 119) | FIG. 38B | A |
| rs2952768 crRNA T | (SEQ. I.D. No. 120) | (SEQ. I.D. No. 121) | FIG. 38B | A |
| rs4363657 crRNA C | (SEQ. I.D. No. 122) | (SEQ. I.D. No. 123) | FIG. 38B | A |
| rs4363657 crRNA T | (SEQ. I.D. No. 124) | (SEQ. I.D. No. 125) | FIG. 38B | A |
| rs601338 crRNA A | (SEQ. I.D. No. 126) | (SEQ. I.D. No. 127) | FIG. 38B | G |
| rs601338 crRNA G | (SEQ. I.D. No. 128) | (SEQ. I.D. No. 129) | FIG. 38B | G |
| rs5082 crRNA G | (SEQ. I.D. No. 130) | (SEQ. I.D. No. 131) | FIG. 40A | A |
| rs5082 crRNA A | (SEQ. I.D. No. 132) | (SEQ. I.D. No. 133) | FIG. 40A | A |
| EGFR L858R wild-type | (SEQ. I.D. No. 134) | (SEQ. I.D. No. 135) | FIG. 38C | C |
| crRNA | | | | |
| EGFR L858R mutant | (SEQ. I.D. No. 136) | (SEQ. I.D. No. 137) | FIG. 38C | C |
| crRNA | | | | |
| BRAF V600E wild-type | (SEQ. I.D. No. 138) | (SEQ. I.D. No. 139) | FIG. 38C | A |
| crRNA | | | | |
| BRAF V600E mutant | (SEQ. I.D. No. 140) | (SEQ. I.D. No. 141) | FIG. 38C | A |
| crRNA | | | | |
| 23 nt mismatch crRNA 1 | (SEQ. I.D. No. 303) | (SEQ. I.D. No. 304) | FIG. 57D | C |
| 23 nt mismatch crRNA 2 | (SEQ. I.D. No. 305) | (SEQ. I.D. No. 306) | FIG. 57D | C |
| 23 nt mismatch crRNA 4 | (SEQ. I.D. No. 307) | (SEQ. I.D. No. 308) | FIG. 57D | C |
| 23 nt mismatch crRNA 5 | (SEQ. I.D. No. 234) | (SEQ. I.D. No. 235) | FIG. 57D | C |
| 23 nt mismatch crRNA 6 | (SEQ. I.D. No. 236) | (SEQ. I.D. No. 237) | FIG. 57D | C |
| 23 nt mismatch crRNA 7 | (SEQ. I.D. No. 238) | (SEQ. I.D. No. 239) | FIG. 57D | C |
| 20 nt mismatch crRNA 1 | (SEQ. I.D. No. 240) | (SEQ. I.D. No. 241) | FIG. 57F | C |
| 20 nt mismatch crRNA 2 | (SEQ. I.D. No. 242) | (SEQ. I.D. No. 243) | FIG. 57F | C |
| 20 nt mismatch crRNA 4 | (SEQ. I.D. No. 244) | (SEQ. I.D. No. 245) | FIG. 57F | C |
| 20 nt mismatch crRNA 5 | (SEQ. I.D. No. 246) | (SEQ. I.D. No. 247) | FIG. 57F | C |
| 20 nt mismatch crRNA 6 | (SEQ. I.D. No. 248) | (SEQ. I.D. No. 249) | FIG. 57F | C |
| 20 nt mismatch crRNA 7 | (SEQ. I.D. No. 250) | (SEQ. I.D. No. 251) | FIG. 57F | C |
| target mismatch 4 | (SEQ. I.D. No. 252) | (SEQ. I.D. No. 253) | FIG. 58B | C |
| mismatch crRNA 1 | | | | |
| target mismatch 4 | (SEQ. I.D. No. 254) | (SEQ. I.D. No.255) | FIG. 58B | C |
| mismatch crRNA 2 | | | | |
| target mismatch 4 | (SEQ. I.D. No. 256) | (SEQ. I.D. No. 257) | FIG. 58B | C |
| mismatch crRNA 3 | | | | |
| target mismatch 4 | (SEQ. I.D. No. 258) | (SEQ. I.D. No. 259) | FIG. 58B | C |
| mismatch crRNA 5 | | | | |
| target mismatch 4 | (SEQ. I.D. No. 260) | (SEQ. I.D. No. 261) | FIG. 58B | C |
| mismatch crRNA 6 | | | | |
| target mismatch 4 | (SEQ. I.D. No. 262) | (SEQ. I.D. No. 263) | FIG. 58B | C |
| mismatch crRNA 7 | | | | |
| target mismatch 5 | (SEQ. I.D. No. 264) | (SEQ. I.D. No. 265) | FIG. 58B | C |
| mismatch crRNA 2 | | | | |
| target mismatch 5 | (SEQ. I.D. No. 266) | (SEQ. I.D. No. 267) | FIG. 58B | C |
| mismatch crRNA 3 | | | | |
| target mismatch 5 | (SEQ. I.D. No. 268) | (SEQ. I.D. No. 269) | FIG. 58B | C |
| mismatch crRNA 4 | | | | |
| target mismatch 5 | (SEQ. I.D. No. 270) | (SEQ. I.D. No. 271) | FIG. 58B | C |
| mismatch crRNA 6 | | | | |
| target mismatch 5 | (SEQ. I.D. No. 272) | (SEQ. I.D. No. 273) | FIG. 58B | C |
| mismatch crRNA 7 | | | | |
| target mismatch 5 | (SEQ. I.D. No. 274) | (SEQ. I.D. No. 275) | FIG. 58B | C |
| mismatch crRNA 8 | | | | |
| target mismatch 6 | (SEQ. I.D. No. 276) | (SEQ. I.D. No. 277) | FIG. 58B | C |
| mismatch crRNA 3 | | | | |
| target mismatch 6 | (SEQ. I.D. No. 278) | (SEQ. I.D. No. 279) | FIG. 58B | C |
| mismatch crRNA 4 | | | | |
| target mismatch 6 | (SEQ. I.D. No. 280) | (SEQ. I.D. No. 281) | FIG. 58B | C |
| mismatch crRNA 5 | | | | |
| target mismatch 6 | (SEQ. I.D. No. 282) | (SEQ. I.D. No. 283) | FIG. 58B | C |
| mismatch crRNA 7 | | | | |
| target mismatch 6 | (SEQ. I.D. No. 284) | (SEQ. I.D. No. 285) | FIG. 58B | C |
| mismatch crRNA 8 | | | | |
| target mismatch 6 | (SEQ. I.D. No. 286) | (SEQ. I.D. No. 287) | FIG. 58B | C |
| mismatch crRNA 9 | | | | |

TABLE 18
RNA and DNA targets used in this Example

| Name | Sequence | 1^{st} Fig |
|---|---|---|
| ssRNA 1 (C PFS) | g (SEQ. I.D. No. 288) | FIG. 2F |
| ssRNA 1 (G PFS) | (SEQ. I.D. No. 289) | FIG. 2F |
| ssRNA 1 (A PFS) | (SEQ. I.D. No. 290) | FIG. 2F |
| ssRNA 1 (U PFS) | (SEQ. I.D. No. 291) | FIG. 2F |
| ssDNA 1 | (SEQ. I.D. No. 292) | FIG. 27 |
| DNA 2 | (SEQ. I.D. No. 293) | FIG. 54B |
| ZIKV in lentivirus | (SEQ. I.D. No. 294) | FIG. 31B |
| DENV in lentivirus | (SEQ. I.D. No. 295) | FIG. 31B |
| Synthetic ZIKV target | (SEQ. I.D. No. 296) | FIG. 33D |
| Synthetic African ZIKV target | (SEQ. I.D. No. 297) | FIG. 37A |
| Synthetic American ZIKV target | (SEQ. I.D. No. 298) | FIG. 37A |
| Synthetic Dengue strain 1 target | (SEQ. I.D. No. 299) | FIG. 37C |
| Synthetic Dengue strain 3 target | (SEQ. I.D. No. 300) | FIG. 37C |
| ssRNA 2 | (SEQ. I.D. No. 301) | FIG. 36A |
| ssRNA 3 | (SEQ. I.D. No. 302) | FIG. 36A |

TABLE 19
plasmids used in this Example

| Plasmid | | |
|---|---|---|
| Name | Description | Link to plasmid map |
| pC004 | beta-lactamase | https://benchling.com/s/lPJ1cCwR |
| | screening target | |
| pC009 | LshCas13a locus into | https://benchling.com/s/ |
| | pACYC184 with | seqylkMuglYmiG4A3VhShZg |
| | targeting spacer | |
| pC010 | LshCas13a locus into | https://benchling.com/s/seq- |
| | pACYC184 with | 2WApFr3zni1GOACyQY8a |
| | nontargeting spacer | |
| pC011 | LwCas13a locus into | https://benchling.com/s/seq- |
| | pACYC184 with | Vyk8qK2fyhzegfNgLJHM |
| | targeting spacer | |
| pC012 | LwCas13a locus into | https://benchling.com/s/seq- |
| | pACYC184 with | RxZAgPBzBUGQThkxR2Kx |
| | nontargeting spacer | |
| pC013 | Twinstrep-SUMO- | https://benchling.com/s/seq- |
| | huLwCas13a for | 66CfLwu7sLMQMbcXe7Ih |
| | bacterial expression | |

### Example 3—C2c2 Prevents Infection and Reduces Replication of Lymphocytic Choriomeningitis (LCMV)

[0637] Guide RNAs were designed to bind to various areas of the LCMV genome, as indicated in FIG. 67 and are listed in Table 20 below.

TABLE 20

| gRNA | | SEQ |
|---|---|---|
| anno- | | ID |
| tation | gRNA sequence | NO |
| L1 | ctcacgaagaaagttgtgcaaccaaaca | 624 |
| L2 | tcttcaatctggttggtaatggatattt | 625 |
| L3 | gccaatttgttagtgtcctctataaatt | 626 |
| L4 | tatctcacagaccctatttgattttgcc | 627 |
| L5 | aaattcttcattaaattcaccatttttg | 628 |
| L6 | tatagtttaaacataactctctcaattc | 629 |
| S1 | atccaaaaagcctaggatccccggtgcg | 630 |
| S2 | agaatgtcaagttgtattggatggttat | 631 |
| S3 | aaagcagccttgttgtagtcaattagtc | 632 |
| S4 | tgatctctttcttctttttgtcccttac | 633 |
| S5 | tctctttcttctttttgtcccttactat | 634 |
| S6 | caatcaaatgcctaggatccactgtgcg | 635 |

[0638] A plasmid expressing Leptotrichia wadei (Lw) C2c2/Cas13a fused to msfGFP with a nuclear export signal, and a plasmid expressing guide RNA were transfected into 293FT cells using Lipofectamine 2000. 293FT cells were plated simultaneously to lipofectamine-plasmid mixture addition. After 24 h, the transfected 293FT cells were infected with LCMV armstrong (MOI 5, 1 h) (viral titer was determined by focus forming unit assay with Vero cells). After 1 hour of infection, cells were washed with citrate buffer to destroy virus remaining in the infection media that did not infect the cells. 48 hours post infection, virus-containing supernatant was removed and diluted 1:10 in Nuclease-free water and then used as input for RT-qPCR with primers against LCMV GP. The results are shown in FIG. 68.

[0639] 293FT cells were plated 1 day prior to LCMV infection, so that infection was performed at approximately 80-85% confluency. 24 h post plating, 293FT cells were infected with LCMV Armstrong (MOI 5, 1 h) (viral titer was determined by focus forming unit assay with Vero cells). After 1 hour of infection, cells were washed with citrate buffer to destroy virus remaining in the infection media that did not infect the cells. After 24 h, a plasmid expressing Lw C2c2/Cas13a fused to msfGFP with a nuclear export signal, and a plasmid expressing guide RNA was transfected into 293FT cells using Lipofectamine 2000. 48 h after infection, virus-containing supernatant was removed and diluted 1:10 in Nuclease-free water and then used as input for RT-qPCR with primers against LCMV GP. The results are shown in FIG. 69.

[0640] A plasmid expressing Lw C2c2/Cas13a fused to msfGFP with a nuclear export signal, and either a single plasmid or multiple plasmids expressing guide RNA(s) were transfected into 293FT cells using Lipofectamine 2000. 293FT cells were plated simultaneously to lipofectamine-plasmid mixture addition. Cells were transfected with 1 to 4 different guide RNAs. After 24 h, the cells were infected with LCMV Armstrong (MOI 5, 1 h) (viral titer was determined by focus forming unit assay with Vero cells). After 1 hour of infection, cells were washed with citrate buffer to destroy virus remaining in the infection media that did not infect the cells. 48 hours post infection, virus-containing supernatant was removed and diluted 1:10 in Nuclease-free water and then used as input for RT-qPCR with primers against LCMV GP. The results are shown in FIG. 70.

[0641] From FIGS. 68-70, it is clear that the CRISPR system designed to target viral RNA can reduce viral replication and thus viral load, which is even more pronounced when using multiple guide RNAs.

### Example 4 Whole Genome Screen of LCMV for Cas13 Targeting Guides

[0642] A genome-wide screen was performed to identify the most efficient guide RNAs. 283 guide RNAs are tiled across the LCMV genome: every 50 nt on the coding strand (207 guides) and every 150 nt on the non-coding strand (76 guides).

[0643] LCMV Screen design and approach: To conduct a full-genome screen for guides that reduce LCMV replication guides were tiled across both the S and L segment of the LCMV genome. For coding regions, a 28 nt guide was designed every 50 nt along the coding region. For non-coding regions, guides were designed every 150 nt. There are 4 coding regions for LCMV for the four proteins (GPC, NP (or dN), Z and L) and each of these 4 proteins has their own non-coding region. With this strategy, 283 guides were tested total: GPC: 11 guides in the non-coding region and 32 guides in the coding region; NP: 12 guides in the non-coding region and 35 guides in the coding region; Z: 4 guides in the non-coding region and 7 guides in the coding region; L: 49 guides in the non-coding region and 133 guides in the coding region. The spacer sequences of the respective gRNAs, as well as their relative positions within the LCMV genome and LMCV genes are provided in Table 21 below.

TABLE 21

| | ID | Spacer sequence | | |
|---|---|---|---|---|
| 1 | L_targ_Z_Lsh/Lw2/Ca/LbFSL_1 | (SEQ. ID. No. 636) | 1 | |
| 2 | L_targ_Z_Lsh/Lw2/Ca/LbFSL_2 | (SEQ. ID. No. 637) | 2 | |
| 3 | L_targ_Z_Lsh/Lw2/Ca/LbFSL_3 | (SEQ. ID. No. 638) | 3 | |
| 4 | L_targ_Z_Lsh/Lw2/Ca/LbFSL_4 | (SEQ. ID. No. 639) | 4 | |
| 5 | L_targ_Z_Lsh/Lw2/Ca/LbFSL_5 | (SEQ. ID. No. 640) | 5 | |
| 6 | L_targ_Z_Lsh/Lw2/Ca/LbFSL_6 | (SEQ. ID. No. 641) | 6 | |
| 7 | L_targ_Z_Lsh/Lw2/Ca/LbFSL_7 | (SEQ. ID. No. 642) | 7 | |
| 1 | L_targ_L_Lsh/Lw2/Ca/LbFSL_1 | (SEQ. ID. No. 643) | 8 | START OF L |
| 2 | L_targ_L_Lsh/Lw2/Ca/LbFSL_2 | (SEQ. ID. No. 644) | 9 | |
| 3 | L_targ_L_Lsh/Lw2/Ca/LbFSL_3 | (SEQ. ID. No. 645) | 10 | |
| 4 | L_targ_L_Lsh/Lw2/Ca/LbFSL_4 | (SEQ. ID. No. 646) | 11 | |
| 5 | L_targ_L_Lsh/Lw2/Ca/LbFSL_5 | (SEQ. ID. No. 647) | 12 | |
| 6 | L_targ_L_Lsh/Lw2/Ca/LbFSL_6 | (SEQ. ID. No. 648) | 13 | |
| 7 | L_targ_L_Lsh/Lw2/Ca/LbFSL_7 | (SEQ. ID. No. 649) | 14 | |
| 8 | L_targ_L_Lsh/Lw2/Ca/LbFSL_8 | (SEQ. ID. No. 650) | 15 | |
| 9 | L_targ_L_Lsh/Lw2/Ca/LbFSL_9 | (SEQ. ID. No. 651) | 16 | |
| 10 | L_targ_L_Lsh/Lw2/Ca/LbFSL_10 | (SEQ. ID. No. 652) | 17 | |
| 11 | L_targ_L_Lsh/Lw2/Ca/LbFSL_11 | (SEQ. ID. No. 653) | 18 | |
| 12 | L_targ_L_Lsh/Lw2/Ca/LbFSL_12 | (SEQ. ID. No. 654) | 19 | |
| 13 | L_targ_L_Lsh/Lw2/Ca/LbFSL_13 | (SEQ. ID. No. 655) | 20 | |
| 14 | L_targ_L_Lsh/Lw2/Ca/LbFSL_14 | (SEQ. ID. No. 656) | 21 | |
| 15 | L_targ_L_Lsh/Lw2/Ca/LbFSL_15 | (SEQ. ID. No. 657) | 22 | |
| 16 | L_targ_L_Lsh/Lw2/Ca/LbFSL_16 | (SEQ. ID. No. 658) | 23 | |
| 17 | L_targ_L_Lsh/Lw2/Ca/LbFSL_17 | (SEQ. ID. No. 659) | 24 | |
| 18 | L_targ_L_Lsh/Lw2/Ca/LbFSL_18 | (SEQ. ID. No. 660) | 25 | |
| 19 | L_targ_L_Lsh/Lw2/Ca/LbFSL_19 | (SEQ. ID. No. 661) | 26 | |
| 20 | L_targ_L_Lsh/Lw2/Ca/LbFSL_20 | (SEQ. ID. No. 662) | 27 | |
| 21 | L_targ_L_Lsh/Lw2/Ca/LbFSL_21 | (SEQ. ID. No. 663) | 28 | |
| 22 | L_targ_L_Lsh/Lw2/Ca/LbFSL_22 | (SEQ. ID. No. 664) | 29 | |
| 23 | L_targ_L_Lsh/Lw2/Ca/LbFSL_23 | (SEQ. ID. No. 665) | 30 | |
| 24 | L_targ_L_Lsh/Lw2/Ca/LbFSL_24 | (SEQ. ID. No. 666) | 31 | |
| 25 | L_targ_L_Lsh/Lw2/Ca/LbFSL_25 | (SEQ. ID. No. 667) | 32 | |
| 26 | L_targ_L_Lsh/Lw2/Ca/LbFSL_26 | (SEQ. ID. No. 668) | 33 | |
| 27 | L_targ_L_Lsh/Lw2/Ca/LbFSL_27 | (SEQ. ID. No. 669) | 34 | |
| 28 | L_targ_L_Lsh/Lw2/Ca/LbFSL_28 | (SEQ. ID. No. 670) | 35 | |
| 29 | L_targ_L_Lsh/Lw2/Ca/LbFSL_29 | (SEQ. ID. No. 671) | 36 | |
| 30 | L_targ_L_Lsh/Lw2/Ca/LbFSL_30 | (SEQ. ID. No. 672) | 37 | |
| 31 | L_targ_L_Lsh/Lw2/Ca/LbFSL_31 | (SEQ. ID. No. 673) | 38 | |
| 32 | L_targ_L_Lsh/Lw2/Ca/LbFSL_32 | (SEQ. ID. No. 674) | 39 | |
| 33 | L_targ_L_Lsh/Lw2/Ca/LbFSL_33 | (SEQ. ID. No. 675) | 40 | |
| 34 | L_targ_L_Lsh/Lw2/Ca/LbFSL_34 | (SEQ. ID. No. 676) | 41 | |
| 35 | L_targ_L_Lsh/Lw2/Ca/LbFSL_35 | (SEQ. ID. No. 677) | 42 | |
| 36 | L_targ_L_Lsh/Lw2/Ca/LbFSL_36 | (SEQ. ID. No. 678) | 43 | |
| 37 | L_targ_L_Lsh/Lw2/Ca/LbFSL_37 | (SEQ. ID. No. 679) | 44 | |
| 38 | L_targ_L_Lsh/Lw2/Ca/LbFSL_38 | (SEQ. ID. No. 680) | 45 | |
| 39 | L_targ_L_Lsh/Lw2/Ca/LbFSL_39 | (SEQ. ID. No. 681) | 46 | |
| 40 | L_targ_L_Lsh/Lw2/Ca/LbFSL_40 | (SEQ. ID. No. 682) | 47 | |
| 41 | L_targ_L_Lsh/Lw2/Ca/LbFSL_41 | (SEQ. ID. No. 683) | 48 | |
| 42 | L_targ_L_Lsh/Lw2/Ca/LbFSL_42 | (SEQ. ID. No. 684) | 49 | |
| 43 | L_targ_L_Lsh/Lw2/Ca/LbFSL_43 | (SEQ. ID. No. 685) | 50 | |
| 44 | L_targ_L_Lsh/Lw2/Ca/LbFSL_44 | (SEQ. ID. No. 686) | 51 | |
| 45 | L_targ_L_Lsh/Lw2/Ca/LbFSL_45 | (SEQ. ID. No. 687) | 52 | |
| 46 | L_targ_L_Lsh/Lw2/Ca/LbFSL_46 | (SEQ. ID. No. 688) | 53 | |
| 47 | L_targ_L_Lsh/Lw2/Ca/LbFSL_47 | (SEQ. ID. No. 689) | 54 | |
| 48 | L_targ_L_Lsh/Lw2/Ca/LbFSL_48 | (SEQ. ID. No. 690) | 55 | |
| 49 | L_targ_L_Lsh/Lw2/Ca/LbFSL_49 | (SEQ. ID. No. 691) | 56 | |
| 50 | L_targ_L_Lsh/Lw2/Ca/LbFSL_50 | (SEQ. ID. No. 692) | 57 | |
| 51 | L_targ_L_Lsh/Lw2/Ca/LbFSL_51 | (SEQ. ID. No. 693) | 58 | |
| 52 | L_targ_L_Lsh/Lw2/Ca/LbFSL_52 | (SEQ. ID. No. 694) | 59 | |
| 53 | L_targ_L_Lsh/Lw2/Ca/LbFSL_53 | (SEQ. ID. No. 695) | 60 | |
| 54 | L_targ_L_Lsh/Lw2/Ca/LbFSL_54 | (SEQ. ID. No. 696) | 61 | |
| 55 | L_targ_L_Lsh/Lw2/Ca/LbFSL_55 | (SEQ. ID. No. 697) | 62 | |
| 56 | L_targ_L_Lsh/Lw2/Ca/LbFSL_56 | (SEQ. ID. No. 698) | 63 | |
| 57 | L_targ_L_Lsh/Lw2/Ca/LbFSL_57 | (SEQ. ID. No. 699) | 64 | |
| 58 | L_targ_L_Lsh/Lw2/Ca/LbFSL_58 | (SEQ. ID. No. 700) | 65 | |
| 59 | L_targ_L_Lsh/Lw2/Ca/LbFSL_59 | (SEQ. ID. No. 701) | 66 | |
| 60 | L_targ_L_Lsh/Lw2/Ca/LbFSL_60 | (SEQ. ID. No. 702) | 67 | |
| 61 | L_targ_L_Lsh/Lw2/Ca/LbFSL_61 | (SEQ. ID. No. 703) | 68 | |
| 62 | L_targ_L_Lsh/Lw2/Ca/LbFSL_62 | (SEQ. ID. No. 704) | 69 | |
| 63 | L_targ_L_Lsh/Lw2/Ca/LbFSL_63 | (SEQ. ID. No. 705) | 70 | |
| 64 | L_targ_L_Lsh/Lw2/Ca/LbFSL_64 | (SEQ. ID. No. 706) | 71 | |
| 65 | L_targ_L_Lsh/Lw2/Ca/LbFSL_65 | (SEQ. ID. No. 707) | 72 | |
| 66 | L_targ_L_Lsh/Lw2/Ca/LbFSL_66 | (SEQ. ID. No. 708) | 73 | |
| 67 | L_targ_L_Lsh/Lw2/Ca/LbFSL_67 | (SEQ. ID. No. 709) | 74 | |
| 68 | L_targ_L_Lsh/Lw2/Ca/LbFSL_68 | (SEQ. ID. No. 710) | 75 | |
| 69 | L_targ_L_Lsh/Lw2/Ca/LbFSL_69 | (SEQ. ID. No. 711) | 76 | |
| 70 | L_targ_L_Lsh/Lw2/Ca/LbFSL_70 | (SEQ. ID. No. 712) | 77 | |
| 71 | L_targ_L_Lsh/Lw2/Ca/LbFSL_71 | (SEQ. ID. No. 713) | 78 | |
| 72 | L_targ_L_Lsh/Lw2/Ca/LbFSL_72 | (SEQ. ID. No. 714) | 79 | |
| 73 | L_targ_L_Lsh/Lw2/Ca/LbFSL_73 | (SEQ. ID. No. 715) | 80 | |
| 74 | L_targ_L_Lsh/Lw2/Ca/LbFSL_74 | (SEQ. ID. No. 716) | 81 | |
| 75 | L_targ_L_Lsh/Lw2/Ca/LbFSL_75 | (SEQ. ID. No. 717) | 82 | |
| 76 | L_targ_L_Lsh/Lw2/Ca/LbFSL_76 | (SEQ. ID. No. 718) | 83 | |
| 77 | L_targ_L_Lsh/Lw2/Ca/LbFSL_77 | (SEQ. ID. No. 719) | 84 | |
| 78 | L_targ_L_Lsh/Lw2/Ca/LbFSL_78 | (SEQ. ID. No. 720) | 85 | |
| 79 | L_targ_L_Lsh/Lw2/Ca/LbFSL_79 | (SEQ. ID. No. 721) | 86 | |
| 80 | L_targ_L_Lsh/Lw2/Ca/LbFSL_80 | (SEQ. ID. No. 722) | 87 | |
| 81 | L_targ_L_Lsh/Lw2/Ca/LbFSL_81 | (SEQ. ID. No. 723) | 88 | |
| 82 | L_targ_L_Lsh/Lw2/Ca/LbFSL_82 | (SEQ. ID. No. 724) | 89 | |
| 83 | L_targ_L_Lsh/Lw2/Ca/LbFSL_83 | (SEQ. ID. No. 725) | 90 | |
| 84 | L_targ_L_Lsh/Lw2/Ca/LbFSL_84 | (SEQ. ID. No. 726) | 91 | |
| 85 | L_targ_L_Lsh/Lw2/Ca/LbFSL_85 | (SEQ. ID. No. 727) | 92 | |
| 86 | L_targ_L_Lsh/Lw2/Ca/LbFSL_86 | (SEQ. ID. No. 728) | 93 | |
| 87 | L_targ_L_Lsh/Lw2/Ca/LbFSL_87 | (SEQ. ID. No. 729) | 94 | |
| 88 | L_targ_L_Lsh/Lw2/Ca/LbFSL_88 | (SEQ. ID. No. 730) | 95 | |
| 89 | L_targ_L_Lsh/Lw2/Ca/LbFSL_89 | (SEQ. ID. No. 731) | 96 | |
| 90 | L_targ_L_Lsh/Lw2/Ca/LbFSL_90 | (SEQ. ID. No. 732) | 97 | |
| 91 | L_targ_L_Lsh/Lw2/Ca/LbFSL_91 | (SEQ. ID. No. 733) | 98 | |
| 92 | L_targ_L_Lsh/Lw2/Ca/LbFSL_92 | (SEQ. ID. No. 734) | 99 | |
| 93 | L_targ_L_Lsh/Lw2/Ca/LbFSL_93 | (SEQ. ID. No. 735) | 100 | |
| 94 | L_targ_L_Lsh/Lw2/Ca/LbFSL_94 | (SEQ. ID. No. 736) | 101 | |
| 95 | L_targ_L_Lsh/Lw2/Ca/LbFSL_95 | (SEQ. ID. No. 737) | 102 | |
| 96 | L_targ_L_Lsh/Lw2/Ca/LbFSL_96 | (SEQ. ID. No. 738) | 103 | |
| 97 | L_targ_L_Lsh/Lw2/Ca/LbFSL_97 | (SEQ. ID. No. 739) | 104 | |
| 98 | L_targ_L_Lsh/Lw2/Ca/LbFSL_98 | (SEQ. ID. No. 740) | 105 | |
| 99 | L_targ_L_Lsh/Lw2/Ca/LbFSL_99 | (SEQ. ID. No. 741) | 106 | |
| 100 | L_targ_L_Lsh/Lw2/Ca/LbFSL_100 | (SEQ. ID. No. 742) | 107 | |
| 101 | L_targ_L_Lsh/Lw2/Ca/LbFSL_101 | (SEQ. ID. No. 743) | 108 | |
| 102 | L_targ_L_Lsh/Lw2/Ca/LbFSL_102 | (SEQ. ID. No. 744) | 109 | |
| 103 | L_targ_L_Lsh/Lw2/Ca/LbFSL_103 | (SEQ. ID. No. 745) | 110 | |
| 104 | L_targ_L_Lsh/Lw2/Ca/LbFSL_104 | (SEQ. ID. No. 746) | 111 | |
| 105 | L_targ_L_Lsh/Lw2/Ca/LbFSL_105 | (SEQ. ID. No. 747) | 112 | |
| 106 | L_targ_L_Lsh/Lw2/Ca/LbFSL_106 | (SEQ. ID. No. 748) | 113 | |
| 107 | L_targ_L_Lsh/Lw2/Ca/LbFSL_107 | (SEQ. ID. No. 749) | 114 | |
| 108 | L_targ_L_Lsh/Lw2/Ca/LbFSL_108 | (SEQ. ID. No. 750) | 115 | |
| 109 | L_targ_L_Lsh/Lw2/Ca/LbFSL_109 | (SEQ. ID. No. 751) | 116 | |
| 110 | L_targ_L_Lsh/Lw2/Ca/LbFSL_110 | (SEQ. ID. No. 752) | 117 | |
| 111 | L_targ_L_Lsh/Lw2/Ca/LbFSL_111 | (SEQ. ID. No. 753) | 118 | |
| 112 | L_targ_L_Lsh/Lw2/Ca/LbFSL_112 | (SEQ. ID. No. 754) | 119 | |
| 113 | L_targ_L_Lsh/Lw2/Ca/LbFSL_113 | (SEQ. ID. No. 755) | 120 | |
| 114 | L_targ_L_Lsh/Lw2/Ca/LbFSL_114 | (SEQ. ID. No. 756) | 121 | |
| 115 | L_targ_L_Lsh/Lw2/Ca/LbFSL_115 | (SEQ. ID. No. 757) | 122 | |
| 116 | L_targ_L_Lsh/Lw2/Ca/LbFSL_116 | (SEQ. ID. No. 758) | 123 | |
| 117 | L_targ_L_Lsh/Lw2/Ca/LbFSL_117 | (SEQ. ID. No. 759) | 124 | |
| 118 | L_targ_L_Lsh/Lw2/Ca/LbFSL_118 | (SEQ. ID. No. 760) | 125 | |
| 119 | L_targ_L_Lsh/Lw2/Ca/LbFSL_119 | (SEQ. ID. No. 761) | 126 | |
| 120 | L_targ_L_Lsh/Lw2/Ca/LbFSL_120 | (SEQ. ID. No. 762) | 127 | |
| 121 | L_targ_L_Lsh/Lw2/Ca/LbFSL_121 | (SEQ. ID. No. 763) | 128 | |
| 122 | L_targ_L_Lsh/Lw2/Ca/LbFSL_122 | (SEQ. ID. No. 764) | 129 | |
| 123 | L_targ_L_Lsh/Lw2/Ca/LbFSL_123 | (SEQ. ID. No. 765) | 130 | |
| 124 | L_targ_L_Lsh/Lw2/Ca/LbFSL_124 | (SEQ. ID. No. 766) | 131 | |
| 125 | L_targ_L_Lsh/Lw2/Ca/LbFSL_125 | (SEQ. ID. No. 767) | 132 | |
| 126 | L_targ_L_Lsh/Lw2/Ca/LbFSL_126 | (SEQ. ID. No. 768) | 133 | |
| 127 | L_targ_L_Lsh/Lw2/Ca/LbFSL_127 | (SEQ. ID. No. 769) | 134 | |
| 128 | L_targ_L_Lsh/Lw2/Ca/LbFSL_128 | (SEQ. ID. No. 770) | 135 | |
| 129 | L_targ_L_Lsh/Lw2/Ca/LbFSL_129 | (SEQ. ID. No. 771) | 136 | |
| 130 | L_targ_L_Lsh/Lw2/Ca/LbFSL_130 | (SEQ. ID. No. 772) | 137 | |
| 131 | L_targ_L_Lsh/Lw2/Ca/LbFSL_131 | (SEQ. ID. No. 773) | 138 | |
| 132 | L_targ_L_Lsh/Lw2/Ca/LbFSL_132 | (SEQ. ID. No. 774) | 139 | |
| 133 | L_targ_L_Lsh/Lw2/Ca/LbFSL_133 | (SEQ. ID. No. 775) | 140 | START OF GPC |
| 1 | S_targ_GPC_Lsh/Lw2/Ca/LbFSL_1 | (SEQ. ID. No. 776) | 141 | |
| 2 | S_targ_GPC_Lsh/Lw2/Ca/LbFSL_2 | (SEQ. ID. No. 777) | 142 | |
| 3 | S_targ_GPC_Lsh/Lw2/Ca/LbFSL_3 | (SEQ. ID. No. 778) | 143 | |
| 4 | S_targ_GPC_Lsh/Lw2/Ca/LbFSL_4 | (SEQ. ID. No. 779) | 144 | |
| 5 | S_targ_GPC_Lsh/Lw2/Ca/LbFSL_5 | (SEQ. ID. No. 780) | 145 | |
| 6 | S_targ_GPC_Lsh/Lw2/Ca/LbFSL_6 | (SEQ. ID. No. 781) | 146 | |
| 7 | S_targ_GPC_Lsh/Lw2/Ca/LbFSL_7 | (SEQ. ID. No. 782) | 147 | |
| 8 | S_targ_GPC_Lsh/Lw2/Ca/LbFSL_8 | (SEQ. ID. No. 783) | 148 | |
| 9 | S_targ_GPC_Lsh/Lw2/Ca/LbFSL_9 | (SEQ. ID. No. 784) | 149 | |
| 10 | S_targ_GPC_Lsh/Lw2/Ca/LbFSL_10 | (SEQ. ID. No. 785) | 150 | |
| 11 | S_targ_GPC_Lsh/Lw2/Ca/LbFSL_11 | (SEQ. ID. No. 786) | 151 | |
| 12 | S_targ_GPC_Lsh/Lw2/Ca/LbFSL_12 | (SEQ. ID. No. 787) | 152 | |
| 13 | S_targ_GPC_Lsh/Lw2/Ca/LbFSL_13 | (SEQ. ID. No. 788) | 153 | |
| 14 | S_targ_GPC_Lsh/Lw2/Ca/LbFSL_14 | (SEQ. ID. No. 789) | 154 | |
| 15 | S_targ_GPC_Lsh/Lw2/Ca/LbFSL_15 | (SEQ. ID. No. 790) | 155 | |
| 16 | S_targ_GPC_Lsh/Lw2/Ca/LbFSL_16 | (SEQ. ID. No. 791) | 156 | |
| 17 | S_targ_GPC_Lsh/Lw2/Ca/LbFSL_17 | (SEQ. ID. No. 792) | 157 | |
| 18 | S_targ_GPC_Lsh/Lw2/Ca/LbFSL_18 | (SEQ. ID. No. 793) | 158 | |
| 19 | S_targ_GPC_Lsh/Lw2/Ca/LbFSL_19 | (SEQ. ID. No. 794) | 159 | |
| 20 | S_targ_GPC_Lsh/Lw2/Ca/LbFSL_20 | (SEQ. ID. No. 795) | 160 | |
| 21 | S_targ_GPC_Lsh/Lw2/Ca/LbFSL_21 | (SEQ. ID. No. 796) | 161 | |
| 22 | S_targ_GPC_Lsh/Lw2/Ca/LbFSL_22 | (SEQ. ID. No. 797) | 162 | |
| 23 | S_targ_GPC_Lsh/Lw2/Ca/LbFSL_23 | (SEQ. ID. No. 798) | 163 | |
| 24 | S_targ_GPC_Lsh/Lw2/Ca/LbFSL_24 | (SEQ. ID. No. 799) | 164 | |
| 25 | S_targ_GPC_Lsh/Lw2/Ca/LbFSL_25 | (SEQ. ID. No. 800) | 165 | |
| 26 | S_targ_GPC_Lsh/Lw2/Ca/LbFSL_26 | (SEQ. ID. No. 801) | 166 | |
| 27 | S_targ_GPC_Lsh/Lw2/Ca/LbFSL_27 | (SEQ. ID. No. 802) | 167 | |
| 28 | S_targ_GPC_Lsh/Lw2/Ca/LbFSL_28 | (SEQ. ID. No. 803) | 168 | |
| 29 | S_targ_GPC_Lsh/Lw2/Ca/LbFSL_29 | (SEQ. ID. No. 804) | 169 | |
| 30 | S_targ_GPC_Lsh/Lw2/Ca/LbFSL_30 | (SEQ. ID. No. 805) | 170 | |
| 31 | S_targ_GPC_Lsh/Lw2/Ca/LbFSL_31 | (SEQ. ID. No. 806) | 171 | |
| 32 | S_targ_GPC_Lsh/Lw2/Ca/LbFSL_32 | (SEQ. ID. No. 807) | 172 | START OF NP |
| 1 | S_targ_NP_Lsh/Lw2/Ca/LbFSL_1 | (SEQ. ID. No. 808) | 173 | |
| 2 | S_targ_NP_Lsh/Lw2/Ca/LbFSL_2 | (SEQ. ID. No. 809) | 174 | |
| 3 | S_targ_NP_Lsh/Lw2/Ca/LbFSL_3 | (SEQ. ID. No. 810) | 175 | |
| 4 | S_targ_NP_Lsh/Lw2/Ca/LbFSL_4 | (SEQ. ID. No. 811) | 176 | |
| 5 | S_targ_NP_Lsh/Lw2/Ca/LbFSL_5 | (SEQ. ID. No. 812) | 177 | |
| 6 | S_targ_NP_Lsh/Lw2/Ca/LbFSL_6 | (SEQ. ID. No. 813) | 178 | |
| 7 | S_targ_NP_Lsh/Lw2/Ca/LbFSL_7 | (SEQ. ID. No. 814) | 179 | |
| 8 | S_targ_NP_Lsh/Lw2/Ca/LbFSL_8 | (SEQ. ID. No. 815) | 180 | |
| 9 | S_targ_NP_Lsh/Lw2/Ca/LbFSL_9 | (SEQ. ID. No. 816) | 181 | |
| 10 | S_targ_NP_Lsh/Lw2/Ca/LbFSL_10 | (SEQ. ID. No. 817) | 182 | |
| 11 | S_targ_NP_Lsh/Lw2/Ca/LbFSL_11 | (SEQ. ID. No. 818) | 183 | |
| 12 | S_targ_NP_Lsh/Lw2/Ca/LbFSL_12 | (SEQ. ID. No. 819) | 184 | |
| 13 | S_targ_NP_Lsh/Lw2/Ca/LbFSL_13 | (SEQ. ID. No. 820) | 185 | |
| 14 | S_targ_NP_Lsh/Lw2/Ca/LbFSL_14 | (SEQ. ID. No. 821) | 186 | |
| 15 | S_targ_NP_Lsh/Lw2/Ca/LbFSL_15 | (SEQ. ID. No. 822) | 187 | |
| 16 | S_targ_NP_Lsh/Lw2/Ca/LbFSL_16 | (SEQ. ID. No. 823) | 188 | |
| 17 | S_targ_NP_Lsh/Lw2/Ca/LbFSL_17 | (SEQ. ID. No. 824) | 189 | |
| 18 | S_targ_NP_Lsh/Lw2/Ca/LbFSL_18 | (SEQ. ID. No. 825) | 190 | |
| 19 | S_targ_NP_Lsh/Lw2/Ca/LbFSL_19 | (SEQ. ID. No. 826) | 191 | |
| 20 | S_targ_NP_Lsh/Lw2/Ca/LbFSL_20 | (SEQ. ID. No. 827) | 192 | |
| 21 | S_targ_NP_Lsh/Lw2/Ca/LbFSL_21 | (SEQ. ID. No. 828) | 193 | |
| 22 | S_targ_NP_Lsh/Lw2/Ca/LbFSL_22 | (SEQ. ID. No. 829) | 194 | |
| 23 | S_targ_NP_Lsh/Lw2/Ca/LbFSL_23 | (SEQ. ID. No. 830) | 195 | |
| 24 | S_targ_NP_Lsh/Lw2/Ca/LbFSL_24 | (SEQ. ID. No. 831) | 196 | |
| 25 | S_targ_NP_Lsh/Lw2/Ca/LbFSL_25 | (SEQ. ID. No. 832) | 197 | |
| 26 | S_targ_NP_Lsh/Lw2/Ca/LbFSL_26 | (SEQ. ID. No. 833) | 198 | |
| 27 | S_targ_NP_Lsh/Lw2/Ca/LbFSL_27 | (SEQ. ID. No. 834) | 199 | |
| 28 | S_targ_NP_Lsh/Lw2/Ca/LbFSL_28 | (SEQ. ID. No. 835) | 200 | |
| 29 | S_targ_NP_Lsh/Lw2/Ca/LbFSL_29 | (SEQ. ID. No. 836) | 201 | |
| 30 | S_targ_NP_Lsh/Lw2/Ca/LbFSL_30 | (SEQ. ID. No. 837) | 202 | |
| 31 | S_targ_NP_Lsh/Lw2/Ca/LbFSL_31 | (SEQ. ID. No. 838) | 203 | |
| 32 | S_targ_NP_Lsh/Lw2/Ca/LbFSL_32 | (SEQ. ID. No. 839) | 204 | |
| 33 | S_targ_NP_Lsh/Lw2/Ca/LbFSL_33 | (SEQ. ID. No. 840) | 205 | |
| 34 | S_targ_NP_Lsh/Lw2/Ca/LbFSL_34 | (SEQ. ID. No. 841) | 206 | |
| 35 | S_targ_NP_Lsh/Lw2/Ca/LbFSL_35 | (SEQ. ID. No. 842) | 207 | |
| 1 | L_targ_Znc_Lsh/Lw2/Ca/LbFSL_1 | (SEQ. ID. No. 843) | 208 | START OF Znc |
| 2 | L_targ_Znc_Lsh/Lw2/Ca/LbFSL_2 | (SEQ. ID. No. 844) | 209 | |
| 3 | L_targ_Znc_Lsh/Lw2/Ca/LbFSL_3 | (SEQ. ID. No. 845) | 210 | |
| 4 | L_targ_Znc_Lsh/Lw2/Ca/LbFSL_4 | (SEQ. ID. No. 846) | 211 | |
| 1 | L_targ_Lnc_Lsh/Lw2/Ca/LbFSL_1 | (SEQ. ID. No. 847) | 212 | START of Lnc |
| 2 | L_targ_Lnc_Lsh/Lw2/Ca/LbFSL_2 | (SEQ. ID. No. 848) | 213 | |
| 3 | L_targ_Lnc_Lsh/Lw2/Ca/LbFSL_3 | (SEQ. ID. No. 849) | 214 | |
| 4 | L_targ_Lnc_Lsh/Lw2/Ca/LbFSL_4 | (SEQ. ID. No. 850) | 215 | |
| 5 | L_targ_Lnc_Lsh/Lw2/Ca/LbFSL_5 | (SEQ. ID. No. 851) | 216 | |
| 6 | L_targ_Lnc_Lsh/Lw2/Ca/LbFSL_6 | (SEQ. ID. No. 852) | 217 | |
| 7 | L_targ_Lnc_Lsh/Lw2/Ca/LbFSL_7 | (SEQ. ID. No. 853) | 218 | |
| 8 | L_targ_Lnc_Lsh/Lw2/Ca/LbFSL_8 | (SEQ. ID. No. 854) | 219 | |
| 9 | L_targ_Lnc_Lsh/Lw2/Ca/LbFSL_9 | (SEQ. ID. No. 855) | 220 | |
| 10 | L_targ_Lnc_Lsh/Lw2/Ca/LbFSL_10 | (SEQ. ID. No. 856) | 221 | |
| 11 | L_targ_Lnc_Lsh/Lw2/Ca/LbFSL_11 | (SEQ. ID. No. 857) | 222 | |
| 12 | L_targ_Lnc_Lsh/Lw2/Ca/LbFSL_12 | (SEQ. ID. No. 858) | 223 | |
| 13 | L_targ_Lnc_Lsh/Lw2/Ca/LbFSL_13 | (SEQ. ID. No. 859) | 224 | |
| 14 | L_targ_Lnc_Lsh/Lw2/Ca/LbFSL_14 | (SEQ. ID. No. 860) | 225 | |
| 15 | L_targ_Lnc_Lsh/Lw2/Ca/LbFSL_15 | (SEQ. ID. No. 861) | 226 | |
| 16 | L_targ_Lnc_Lsh/Lw2/Ca/LbFSL_16 | (SEQ. ID. No. 862) | 227 | |
| 17 | L_targ_Lnc_Lsh/Lw2/Ca/LbFSL_17 | (SEQ. ID. No. 863) | 228 | |
| 18 | L_targ_Lnc_Lsh/Lw2/Ca/LbFSL_18 | (SEQ. ID. No. 864) | 229 | |
| 19 | L_targ_Lnc_Lsh/Lw2/Ca/LbFSL_19 | (SEQ. ID. No. 865) | 230 | |
| 20 | L_targ_Lnc_Lsh/Lw2/Ca/LbFSL_20 | (SEQ. ID. No. 866) | 231 | |
| 21 | L_targ_Lnc_Lsh/Lw2/Ca/LbFSL_21 | (SEQ. ID. No. 867) | 232 | |
| 22 | L_targ_Lnc_Lsh/Lw2/Ca/LbFSL_22 | (SEQ. ID. No. 868) | 233 | |
| 23 | L_targ_Lnc_Lsh/Lw2/Ca/LbFSL_23 | (SEQ. ID. No. 869) | 234 | |
| 24 | L_targ_Lnc_Lsh/Lw2/Ca/LbFSL_24 | (SEQ. ID. No. 870) | 235 | |
| 25 | L_targ_Lnc_Lsh/Lw2/Ca/LbFSL_25 | (SEQ. ID. No. 871) | 236 | |
| 26 | L_targ_Lnc_Lsh/Lw2/Ca/LbFSL_26 | (SEQ. ID. No. 872) | 237 | |
| 27 | L_targ_Lnc_Lsh/Lw2/Ca/LbFSL_27 | (SEQ. ID. No. 873) | 238 | |
| 28 | L_targ_Lnc_Lsh/Lw2/Ca/LbFSL_28 | (SEQ. ID. No. 874) | 239 | |
| 29 | L_targ_Lnc_Lsh/Lw2/Ca/LbFSL_29 | (SEQ. ID. No. 875) | 240 | |
| 30 | L_targ_Lnc_Lsh/Lw2/Ca/LbFSL_30 | (SEQ. ID. No. 876) | 241 | |
| 31 | L_targ_Lnc_Lsh/Lw2/Ca/LbFSL_31 | (SEQ. ID. No. 877) | 242 | |
| 32 | L_targ_Lnc_Lsh/Lw2/Ca/LbFSL_32 | (SEQ. ID. No. 878) | 243 | |
| 33 | L_targ_Lnc_Lsh/Lw2/Ca/LbFSL_33 | (SEQ. ID. No. 879) | 244 | |
| 34 | L_targ_Lnc_Lsh/Lw2/Ca/LbFSL_34 | (SEQ. ID. No. 880) | 245 | |
| 35 | L_targ_Lnc_Lsh/Lw2/Ca/LbFSL_35 | (SEQ. ID. No. 881) | 246 | |
| 36 | L_targ_Lnc_Lsh/Lw2/Ca/LbFSL_36 | (SEQ. ID. No. 882) | 247 | |
| 37 | L_targ_Lnc_Lsh/Lw2/Ca/LbFSL_37 | (SEQ. ID. No. 883) | 248 | |
| 38 | L_targ_Lnc_Lsh/Lw2/Ca/LbFSL_38 | (SEQ. ID. No. 884) | 249 | |
| 39 | L_targ_Lnc_Lsh/Lw2/Ca/LbFSL_39 | (SEQ. ID. No. 885) | 250 | |
| 40 | L_targ_Lnc_Lsh/Lw2/Ca/LbFSL_40 | (SEQ. ID. No. 886) | 251 | |
| 41 | L_targ_Lnc_Lsh/Lw2/Ca/LbFSL_41 | (SEQ. ID. No. 887) | 252 | |
| 42 | L_targ_Lnc_Lsh/Lw2/Ca/LbFSL_42 | (SEQ. ID. No. 888) | 253 | |
| 43 | L_targ_Lnc_Lsh/Lw2/Ca/LbFSL_43 | (SEQ. ID. No. 889) | 254 | |
| 44 | L_targ_Lnc_Lsh/Lw2/Ca/LbFSL_44 | (SEQ. ID. No. 890) | 255 | |
| 45 | L_targ_Lnc_Lsh/Lw2/Ca/LbFSL_45 | (SEQ. ID. No. 891) | 256 | |
| 46 | L_targ_Lnc_Lsh/Lw2/Ca/LbFSL_46 | (SEQ. ID. No. 892) | 257 | |
| 47 | L_targ_Lnc_Lsh/Lw2/Ca/LbFSL_47 | (SEQ. ID. No. 893) | 258 | |
| 48 | L_targ_Lnc_Lsh/Lw2/Ca/LbFSL_48 | (SEQ. ID. No. 894) | 259 | |
| 49 | L_targ_Lnc_Lsh/Lw2/Ca/LbFSL_49 | (SEQ. ID. No. 895) | 260 | |
| 1 | S_targ_GPCnc_Lsh/Lw2/Ca/LbFSL_1 | (SEQ. ID. No. 896) | 261 | START OF GPCnc |
| 2 | S_targ_GPCnc_Lsh/Lw2/Ca/LbFSL_2 | (SEQ. ID. No. 897) | 262 | |
| 3 | S_targ_GPCnc_Lsh/Lw2/Ca/LbFSL_3 | (SEQ. ID. No. 898) | 263 | |
| 4 | S_targ_GPCnc_Lsh/Lw2/Ca/LbFSL_4 | (SEQ. ID. No. 899) | 264 | |
| 5 | S_targ_GPCnc_Lsh/Lw2/Ca/LbFSL_5 | (SEQ. ID. No. 900) | 265 | |
| 6 | S_targ_GPCnc_Lsh/Lw2/Ca/LbFSL_6 | (SEQ. ID. No. 901) | 266 | |
| 7 | S_targ_GPCnc_Lsh/Lw2/Ca/LbFSL_7 | (SEQ. ID. No. 902) | 267 | |
| 8 | S_targ_GPCnc_Lsh/Lw2/Ca/LbFSL_8 | (SEQ. ID. No. 903) | 268 | |
| 9 | S_targ_GPCnc_Lsh/Lw2/Ca/LbFSL_9 | (SEQ. ID. No. 904) | 269 | |
| 10 | S_targ_GPCnc_Lsh/Lw2/Ca/LbFSL_10 | (SEQ. ID. No. 905) | 270 | |
| 11 | S_targ_GPCnc_Lsh/Lw2/Ca/LbFSL_11 | (SEQ. ID. No. 906) | 271 | |
| 1 | S_targ_NPnc_Lsh/Lw2/Ca/LbFSL_1 | (SEQ. ID. No. 907) | 272 | START OF NPnc |
| 2 | S_targ_NPnc_Lsh/Lw2/Ca/LbFSL_2 | (SEQ. ID. No. 908) | 273 | |
| 3 | S_targ_NPnc_Lsh/Lw2/Ca/LbFSL_3 | (SEQ. ID. No. 909) | 274 | |
| 4 | S_targ_NPnc_Lsh/Lw2/Ca/LbFSL_4 | (SEQ. ID. No. 910) | 275 | |
| 5 | S_targ_NPnc_Lsh/Lw2/Ca/LbFSL_5 | (SEQ. ID. No. 911) | 276 | |
| 6 | S_targ_NPnc_Lsh/Lw2/Ca/LbFSL_6 | (SEQ. ID. No. 912) | 277 | |
| 7 | S_targ_NPnc_Lsh/Lw2/Ca/LbFSL_7 | (SEQ. ID. No. 913) | 278 | |
| 8 | S_targ_NPnc_Lsh/Lw2/Ca/LbFSL_8 | (SEQ. ID. No. 914) | 279 | |
| 9 | S_targ_NPnc_Lsh/Lw2/Ca/LbFSL_9 | (SEQ. ID. No. 915) | 280 | |
| 10 | S_targ_NPnc_Lsh/Lw2/Ca/LbFSL_10 | (SEQ. ID. No. 916) | 281 | |
| 11 | S_targ_NPnc_Lsh/Lw2/Ca/LbFSL_11 | (SEQ. ID. No. 917) | 282 | |
| 12 | S_targ_NPnc_Lsh/Lw2/Ca/LbFSL_12 | (SEQ. ID. No. 918) | 283 | |

[0644] To perform the screen, HEK293FT cells were reverse transfected with a plasmid encoding Cas13a with BFP fluorescence and a plasmid encoding a single guide using lipofectamine 2000. Three control guides were also reverse transfected: 1 empty vector, and 2 off-target guides. Twenty-four hours after transfection, cells were infected with a GFP-expressing LCMV at an MOI 1 for 1 hour. Viral replication, as measured by GFP fluorescence, was then measured 48 hours post infection (72 hours post reverse transfection). The fraction of guides which reduce viral replication is provided in FIG. 71 and Table 22 below. The amount of viral reduction, as measured by fold change in GFP fluorescence, is provided in FIG. 72. FIG. 73 provides representative images illustrating the reduction of GFP. From FIG. 74 it is clear that targeting guides cluster along the LCMV genome.

TABLE 22

| | Total | Total | Targeting | Targeting |
|---|---|---|---|---|
| | guides | targeting | guides (in | guides (in non- |
| Protein | tested | guides | coding region) | coding region) |
| GPC | 43 | 6 | 5 | 1 |
| NP | 47 | 8 | 7 | 1 |
| Z | 11 | 0 | 0 | 0 |
| L | 182 | 39 | 34 | 5 |
| Totals | 283 | 53 | 46 | 7 |

TABLE 23

| | |
|---|---|
| T7promoter | (SEQ. ID. No. 919) |
| ZikvBrazil_301-700 | (SEQ. ID. No. 920) |
| ZikvBrazil_301-700_N139S | (SEQ. ID. No. 921) |
| T7prom_ZikvBrazil_301-700 | (SEQ. ID. No. 922) |
| T7prom_ZikvBrazil_301-700_N139S | (SEQ. ID. No. 923) |

### Example 5—Determination of Limit of Detection of Zika cDNA, RNA, and Virus Particles

[0645] Limits of detection of Zika virus cDNA, RNA, and virus particles were determined using the SHERLOCK method with Zika virus specific RPA primers and Zika virus specific crRNA.

[0646] To detect cDNA, Zika virus cDNA derived from a viral seed stock was diluted into water or urine. Heat inactivation was performed to simulate the heat inactivation treatment of viral particles in a clinical sample as well as to inactivate the RNAses that are present in human urine. RPA was carried out for 20 minutes followed by Cas13a detection where fluorescence shown in the bar plot is that measured at 1 hour (FIG. 77A).

[0647] To detect RNA, Zika virus RNA derived from a viral seed stock was diluted into water, urine, or previously heat and RNAse inactivated urine. To heat and RNase inactivate healthy urine, TCEP/EDTA is added prior to heat treatment. This treatment shows the importance of RNase inactivation to prevent the degradation of RNA. RT-RPA was carried out for 20 minutes followed by Cas13a detection where fluorescence shown in the bar plot is that measured at 1 hour (FIG. 77B).

[0648] To detect virus particles, Zika virus particles from cell culture supernatant were diluted into PBS or urine. Samples were then heat and RNase inactivated with TCEP/EDTA and a 25 minute heat treatment (20 minutes at 55° C., 5 minutes of 95° C.). This two step heat treatment allows for inactivation of the RNases in urine prior to the release of RNA from the viral particles (Zika virus particles are stable at temperatures below 65° C.). The 95° C. step releases the RNA from the viral particles post RNase inactivation. RT-RPA was carried out for 20 minutes followed by Cas13a detection where fluorescence shown in the bar plot is that measured at 1 hour (FIG. 77C).

[0649] Single nucleotide variants in viral samples were detected as follows. Samples were tested with both a crRNA that targets the mutant sequence and a crRNA that targets the wild-type sequence and the relative fluorescence was used to determine the allele present (FIG. 78A).

[0650] FIG. 78B demonstrates the genome position of the 3 SNPs tested by the SHERLOCK method. The simplified tree demonstrates the relationships between the SNPs and where the SNPs arose during the 2015 Zika virus outbreak.

[0651] FIG. 78C shows graphs corresponding to different SNPs that arose during the 2015 Zika virus outbreak with the location where the SNP arose. Each bar represents either a synthetic gBlock with the sequence that corresponds to either the mutant variant or wild-type variant, cDNA derived from a seed stock that possess the ancestral sequence (i.e. no mutant variants) or no input (water). Each sample was amplified by a 20 minute RPA and the bars represent the fluorescence at 1 hour of the detection reaction. The darker shaded bars represent the fluorescence measured when the mutant crRNA was used in the detection reaction and the lighter bars represent the fluorescence measured when the wild-type crRNA was used.

[0652] cDNA was derived from three clinical samples. One associate with each locale of the 2015 Zika outbreak, and cDNA derived from a seed stock with the ancestral sequence (no mutant variants) was tested with the mutant crRNA and wild-type crRNA. The graph shown in FIG. 78D represents the fluorescence ratio between the mutant cRNA over the wild-type cRNA at the 1 hour time point. A ratio greater than 1 indicates that the mutant crRNA had a greater fluorescence than that of the wild-type crRNA and thus indicates the presence of the mutant variant in the sample tested. Purple is the DOMUSA SNP, Orange the USA SNP, and green the HND SNP.

[0653] The heatmap in FIG. 78E displays the log₂ transformed fluorescence ratios shown in FIG. 78D for each of the samples against each of the crRNAs. Values greater than 0 indicate the presence of the mutant variant.

[0654] S139N is the variant that was recently identified to play a role in the microcephaly phenotype observed during the recent Zika outbreak (Yuan, L. 2017. Science). Each bar in FIG. 78F represents either a synthetic gBlock with the sequence that corresponds to either the S139N variant or the N139S variant, cDNA derived from a seed stock that possess the S139N variant, or no input (water). Each sample was amplified by a 20 minute RPA and the bars represent the fluorescence at 1 hour of the detection reaction. The darkly shaded bars represent the fluorescence measured when the S139N targeting crRNA was used in the detection reaction and the lighter bars represent the fluorescence measured when the N139S targeting crRNA was used. We were able to design RPA primers and guides and test them within a week of the publication associating this variant with microcephaly—highlighting the speed/real-time nature of this method.

### Example 6—SHERLOCK Panel for Dengue Virus

[0655] The multi-serotype Dengue SHERLOCK panel is illustrated in FIG. 79A. One set of RPA primers that are Dengue specific are used during the RPA. Then the RPA reaction is split into 4 reactions where a serotype specific guide is in each reaction to allow for distinguishing between the 4 serotypes of Dengue virus. In FIG. 79B, each tick on the x-axis represents the gblock template that was used as input for the SHERLOCK reaction. Each template was amplified with a single set of RPA primers and then each RPA reaction was tested against each of the crRNAs (DENV1 crRNA, DENV2 crRNA, DENV3 crRNA, and DENV4 crRNA). RPA reaction was carried out for 20 minutes, and the fluorescence shown in the bar plot is that measured at 3 hours. Each shade of purple designates a serotype specific crRNA. An alternative representation of this bar plot is shown in FIG. 79C as a log 10 scaled fluorescence.

### Example 7—SHERLOCK Panel for Various Flaviruses

[0656] FIG. 80A illustrates how the Flavivirus SHERLOCK panel works. One set of RPA primers that can amplify 4 different related flaviviruses are used in the RPA. Then the RPA reaction is split into 4 reactions where a virus specific guide is in each reaction to allow for distinguishing between the presence of Zika virus, West Nile virus, Dengue virus, and Yellow Fever virus. In FIG. 80B, each tick on the x-axis represents the gblock template that was used as input for the SHERLOCK reaction. Each template was amplified with a single set of RPA primers and then each RPA reaction was tested against each of the crRNAs (ZIKV crRNA, WNV crRNA, DENV crRNA, and YFV crRNA). RPA reaction was carried out for 20 minutes, and the fluorescence shown in the bar plot is that measured at 3 hours. Each color designates a virus-specific crRNA. In FIG. 80C, each tick on the x-axis represents the two gblock templates that were used as input for the SHERLOCK reaction to simulate the ability of SHERLOCK to detect co-infections. Each reaction was amplified with a single set of RPA primers and then each RPA reaction was tested against each of the crRNAs (ZIKV crRNA, WNV crRNA, DENV crRNA, and YFV crRNA). The RPA reaction was carried out for 20 minutes, and the fluorescence shown in the bar plot is that measured at 3 hours. Each color designates a virus-specific crRNA. Within each alternating white and grey block, each bar represents the fluorescence resulting from the guide tested with the order of ZIKV crRNA, WNV crRNA, DENV crRNA, and YFV crRNA preserved in each block. Alternative representations of the measured fluorescence represented in the bar plots in FIGS. 80B and 80C are shown in FIGS. 81A and 81B, respectively.

### Example 8—Viral Diagnosis with CRISPR-Cas13a

[0657] Applicants use the CRISPR-Cas13 detection platform SHERLOCK to directly detect Zika virus from urine, distinguish multiple pathogenic viruses, and identify clinically relevant adaptive mutations.

[0658] Recent viral outbreaks have highlighted the great challenges of diagnosing viral infections, especially in remote areas far from clinical laboratories. Viral diagnosis was especially difficult during the 2016 ZIKV outbreak, in part because ZIKV maintains low titers in human specimens and is a transient infection. As a result of limitations with existing diagnostic technologies, the virus circulated for months before the first cases were confirmed clinically (Metsky et al. 2017). For example, nucleic acid detection is very sensitive and rapidly adaptable, but requires extensive sample manipulation and expensive machinery. In contrast, antigen- and antibody-based tests are faster and require minimal equipment, but have reduced sensitivity and specificity and can take months to develop. An ideal diagnostic would combine the sensitivity, specificity, and flexibility of nucleic acid diagnostics with the low cost and speed of antigen-based tests. Such a diagnostic could be rapidly developed and deployed in the face of emerging viral outbreaks, and would be suitable for disease surveillance in the field.

[0659] Here, Applicants develop viral diagnostics using the Cas13-based nucleic acid detection platform SHERLOCK (Specific High Sensitivity Enzymatic Reporter UnLOCKing) (FIG. 82A). Cas13, an RNA-guided ribonuclease, can amplify signals >1,000-fold via collateral cleavage, and provides enhanced specificity based on crRNA:target pairing. Cas13 also allows for a highly adaptable viral diagnostic platform as new viral pathogens or mutations can be targeted by merely changing the crRNA sequence. Pairing Cas13a with an upstream isothermal amplification using Recombinase Polymerase Amplification (RPA) further increases its sensitivity without the requirement of expensive machinery. Using this SHERLOCK platform, Applicants detect viruses directly from bodily fluids, create virus panels to distinguish multiple viral species and strains, and develop diagnostics to identify clinically relevant mutations.

[0660] Applicants first examined the sensitivity of a SHERLOCK assay for ZIKV (Gootenberg et al. 2017), and determined that it had single-copy (1 cp) sensitivity for ZIKV cDNA (FIG. 86). Applicants evaluated the performance of SHERLOCK on a set of 40 cDNAs derived from samples from the 2016 ZIKV outbreak (FIG. 82B, FIG. 87). This included 37 samples from patients with ZIKV (13 plasma samples, 13 serum samples, and 11 urine samples) and 3 samples from mosquito pools. Applicants were able to detect ZIKV in cDNA from 25 of 37 clinical samples (68%), and 3 of 3 mosquito pools (100%). Applicants compared SHERLOCK detection for these 40 cDNA samples to a much more involved amplicon PCR method where the entire ZIKV cDNA is tiled and amplified using two different PCR primer pools containing 35 target sites (Quick et al. 2017) (FIG. 82C). Applicants quantified these amplicon PCR products using an Agilent Tapestation, and selected a threshold for determining the presence or absence of ZIKV (red dashed line) to maximize accuracy as measured by genome sequence coverage (FIG. 88, see Methods for details). Of the 32 samples that were positive using at least one method, 25 were positive by both methods, for 78% concordance (see Venn diagram). Both methods had equal performance, despite tiling the whole genome by amplicon PCR, and also using a larger input volume for amplicon PCR (2.5 μl) than for SHERLOCK (1 μl). These results demonstrate the sensitivity of SHERLOCK and its successful application to clinical samples.

[0661] Nucleic acid extraction is time-consuming, requires expert knowledge, and often is not feasible in the field. Applicants thus developed a SHERLOCK protocol that can amplify and detect nucleic acid from urine without extraction. Applicants used a combination of heat and chemical reduction to lyse viral particles and inactivate RNases (FIG. 89), which are present in urine at ≅1 μg/ml (Weickmann and Glitz 1982). Applicants directly used this treated urine as an input to RPA without dilution. This approach enabled single-copy detection of ZIKV cDNA diluted in urine (FIG. 83A). If ZIKV RNA was diluted in non-treated urine, the sensitivity was reduced to 3.6 fM (1,800 cp/μl), presumably due to RNase degradation (FIG. 83B). Diluting ZIKV RNA in treated urine allowed for equally sensitive detection compared with water (36 aM or 18 cp/μl, FIG. 90). Naturally, ZIKV RNA is encapsulated in viral particles, which protect the RNA from degradation. Applicants developed a 2-step heat inactivation protocol in which samples are first heated below the melting temperature of ZIKV particles to inactivate RNases, then at 95° C. for 5 minutes to lyse and inactivate viral particles (FIG. 91) (Miiller et al. 2016). This enabled sensitive detection of ZIKV from infectious particles at 20 aM (10 cp/μl) in <2 h (FIG. 83C). To reach a sensitivity of 6 aM (3 cp/μl) in urine, Applicants used a 3-hour detection step, for a total turnaround time <4 hours (FIG. 83C inset).

[0662] Many genetically and antigenically similar Flaviviruses co-circulate within the Americas and Africa; therefore, Applicants expanded SHERLOCK by developing diagnostic panels to detect related viral species and differentiate between viral serotypes. Using a probe design algorithm developed in the lab, Applicants are able to quickly identify regions within ZIKV, Dengue virus (DENV), West Nile virus (WNV), and Yellow Fever Virus (YFV) that are conserved enough to serve as universal-Flavivirus RPA primer regions. In this way, a single pair of RPA primers can amplify any of the four viruses and then species-specific crRNAs can detect which virus or viruses are present in a given sample (FIG. 84A). Applicants found the universal Flavivirus RPA primers and virus-specific crRNAs were able to detect the presence of synthetic ZIKV, DENV, WNV, and YFV DNA targets in a highly specific manner with <0.22% cross-reactivity (FIG. 84B, FIG. 92). This assay can also detect the presence of all pairwise combinations of flaviviruses, demonstrating its ability to detect mock co-infections (FIG. 84C, FIG. 93). In addition to specifically detecting related viruses, Applicants designed SHERLOCK panels to distinguish between different DENV serotypes using DENV-specific RPA primers and serotype-specific crRNAs (FIG. 84D). Applicants were able to distinguish between DENV serotypes 1-4 with <3.2% cross-reactivity (FIG. 84E, FIG. 94). SHERLOCK can therefore be extended to detect and differentiate between related viruses or serotypes without a need for virus- or serotype-specific RPA primers.

[0663] SHERLOCK is uniquely poised for field-deployable variant identification. Single nucleotide polymorphisms (SNPs) identification typically involves the use of sequencing technologies that require extensive sample processing and are difficult to deploy in the field. SHERLOCK can be used for SNP identification by placing the SNP in the 3rd position of the crRNA and a synthetic mismatch in the 5th position of the crRNA (FIG. 85A) (Gootenberg et al. 2017). Applicants designed SHERLOCK diagnostics for 3 region-specific SNPs from the 2016 ZIKV outbreak (FIG. 85B). Applicants validated the performance of each of these assays on synthetic targets and an ancestral viral seedstock (FIG. 85C). To genotype samples, Applicants take the ratio of the fluorescence of the derived crRNA (FIG. 85A, dark bars) over that of the ancestral crRNA (FIG. 85A, light bars). This ratio should be greater than 1 for samples containing the SNP, and less than 1 for samples that do not contain the SNP. Applicants tested the SNP assays on cDNA samples from patients from Honduras and the Dominican Republic, and a mosquito pool from the United States (FIG. 85D). Applicants observed the expected fluorescence ratios, as shown in the bar plots (FIG. 85D) and heatmaps (FIG. 85E). These results highlight the single-nucleotide specificity of SHERLOCK.

[0664] Finally, Applicants demonstrated that SHERLOCK can be rapidly adapted to identify emerging functional mutations. Within 1 week of publication of a report describing a ZIKV point mutation in prM (S139N) that contributes to fetal microcephaly (Yuan et al. 2017) (FIG. 95), Applicants designed, ordered, and successfully tested a SHERLOCK diagnostic that could distinguish nucleic acid sequences with or without the S139N mutation (FIG. 85F). Applicants tested an alternative crRNA design (no synthetic mismatches and the SNP at position 7) that could also distinguish the 139S and 139N alleles (FIG. 96). To further illustrate the ease of developing new SHERLOCK diagnostics for clinically relevant mutations, Applicants developed assays for the six most commonly observed drug-resistance mutations in HIV reverse transcriptase (FIG. 97) within 1 week. These developments underscore the adaptability and specificity of the SHERLOCK platform.

[0665] Applicants have demonstrated a variety of useful features of viral SHERLOCK diagnostics including sensitivity, speed, user friendliness, and the ability to multiplex viral diagnostic panels andthe ability to genotype clinically-relevant SNPs. The rapid turnaround time and low requirements for sample processing should enable field testing of SHERLOCK in the near future. In addition, SHERLOCK diagnostics should be easy to develop for a wide variety of viral diseases, including hemorrhagic fevers, sexually transmitted infections, and respiratory illnesses, as well as emerging viral pathogens.

### Example 8—Methods

[0666] Clinical Samples/Ethics Statement.

[0667] Clinical samples used for this study were from clinical studies evaluated and approved by the Institutional Review Boards/Ethics Review Committees at Hospital General de la Plaza de la Salud (Santo Domingo, Dominican Republic), Florida Department of Health (Tallahassee, Fla.), and Universidad Nacional Autonoma de Honduras (Tegucigalpa, Honduras). Massachusetts Institute of Technology (MIT) Institutional Review Board/Ethics Review Committee and the Office of Research Subject Projection at the Broad Institute provided approval for use of samples collected by the previously listed institutions.

[0668] Production of LwCas13a and crRNAs.

[0669] LwCas13a was purified as described (Gootenberg et al. 2017). crRNA DNA templates were annealed to a T7 promoter oligonucleotide at a final concentration of 10 μM in 1×Taq reaction buffer (NEB). This involved 5 minutes of denaturation at 95° C. followed by an anneal at 5° C. per minute down to 4° C. crRNAs were transcribed in vitro using the HiScribe T7 High Yield RNA Synthesis Kit (NEB). Transcriptions were performed according to the manufacturer's instructions for short RNA transcripts, with the volume scaled to 30 al. Reactions were incubated overnight at 37° C. Transcripts were purified using RNAClean XP beads (Beckman Coulter) with a 2× ratio of beads to reaction volume and an additional supplementation of 1.8× isopropanol.

[0670] Sample Preparation.

[0671] Viral RNA was extracted from 140 l of input material using the QIAamp Viral RNA Mini Kit (QIAGEN) with carrier RNA according to the manufacturer's instructions. Samples were eluted in 60 al, and stored at −80 C.

[0672] To produce cDNA, 5 uL of extracted RNA was converted into single-stranded cDNA using methods published previously (Matranga et al. 2014). In short, RNA was reverse transcribed with SuperScript III and random hexamer primers. RNA-DNA duplexes were then degraded with RNase H.

[0673] A single cultured isolate, ZIKV Pernambuco (isolate PE243, KX197192.1), was used as a positive control or as a control for the ancestral sequence in ZIKV detection experiments. Viral RNA was extracted from the seed stock sample.

[0674] RNase inactivation of urine samples was performed by addition of TCEP/EDTA and heating samples. TCEP and EDTA were added to urine samples at final concentrations of 100 mM and 1 mM respectively. Two protocols were used: 1-step inactivation at 95° C. for 10 minutes, or 2-step inactivation at 50° C. for 20 minutes followed by 95° C. for 5 minutes. Inactivations were performed using a thermocycler (Eppendorf MasterCycler) or a dry heat block.

[0675] RPA Reactions and Primer Design.

[0676] For RPA reactions, the Twist-Dx RT-RPA kit was used according to the manufacturer's instructions. Primer concentrations were 480 nM. For amplification reactions involving RNA, Murine RNase inhibitor (NEB M3014L) was used at a final concentration of 2 units per microliter.

[0677] For ZIKV detection, RPA primers RP819/RP821 from a recent publication (Gootenberg et al. 2017) were used. For the Flavivirus panel, RPA primers FLAVI-NS5fwd-1/FLAVI-NS5rev-1 were used. For the Dengue virus panel, RPA primers DENV-3UTRfwd-1/DENV-3UTRrev-1 were used. For region-specific Zika SNP detection, RPA primers DOMUSA-5249-fwd/DOMUSA-5249-rev (DOMUSA5249 SNP), USA-935-fwd/USA-935-rev (USA935 SNP), and HND-2788-fwd/HND-2788-rev (HND2788 SNP) were used. For detecting a Zika SNP associated with microcephaly, RPA primers ZIKV-mcep-fwd and ZIKV-mcep-rev were used. For detecting drug-resistance SNPs in HIV reverse transcriptase, RPA primers HIVRT-149F/HIVRT-348R (K65R, K103N, and V106M SNPs), and HIV-462F/HIVRT-601R (Y181C, M184V, and G190A SNPs) were used.

[0678] Cas13a Detection Reactions and crRNA Design.

[0679] Detection reactions were performed as described (Gootenberg et al. 2017), except that 25 ng of background RNA was used rather than 100 ng. This increases the reaction rate without introducing any spurious cleavage of the reporter oligonucleotide. Unless indicated otherwise, RNase Alert v2 (Thermo) was used as the reporter. Biotek microplate readers (Synergy H4, Neo2, and Cytation 5) were used for measuring fluorescence of the detection reaction. Fluorescence kinetics were monitored using a monochromator with excitation at 485 nm and emission at 520 nm with a reading every 5 minutes for up to 3 hours. Applicants did not observe significant differences in sensitivity between the different machines.

[0680] For ZIKV detection, the crRNA “Zika targeting crRNA 2” from a recent publication (Gootenberg et al. 2017) was used. For the Flavivrus panel, crRNAs ZIKV-NS5at9227 (ZIKV), DENV-NS5at9127 (DENV), WNV-NS5at9243 (WNV), and YFV-NS5at9122 (YFV) were used. For the Dengue virus panel, crRNAs D1-3UTRat10457 (DENV1), D2-3UTRat10433 (DENV2), D3-3UTRat10419 (DENV3), and D4-3UTRat10366 (DENV4) were used. For region-specific Zika SNP detection, crRNAs DOMUSA-5249-ancestral/DOMUSA-5249-derived (DOMUSA5249 SNP), USA-935-ancestral/USA-935-derived (USA935 SNP), and HND-2788-ancestral/HND-2788-derived (HND2788 SNP) were used. For detecting a Zika SNP associated with microcephaly, crRNAs ZIKV-mcep-snp3syn5-ancestral/ZIKV-mcep-snp3syn5-derived (design shown in FIG. 85F), and crRNAs ZIKV-mcep-snp7-ancestral /ZIKV-mcep-snp7-derived (design shown in FIG. 96) were used. For detecting drug-resistance SNPs in HIV reverse transcriptase, crRNAs HIVRT-K65R-ancestral/HIVRT-K65R-derived (K65R SNP), crRNAs HIVRT-K103N-ancestral/HIVRT-K103N-derived (K103N SNP), crRNAs HIVRT-V016M-ancestral/HIVRT-V106M-derived (V106M SNP), crRNAs HIVRT-Y181C-ancestral/HIVRT-Y181C-derived (Y181C SNP), crRNAs HIVRT-M184V-ancestral/HIVRT-M184V-derived (M184V SNP), and crRNAs HIVRT-G190A-ancestral /HIVRT-G190A-derived (G190A SNP) were used.

[0681] Data Analysis.

[0682] Background correction was performed by subtracting the fluorescence values after 10 minutes (FIGS. 82-84) or 20 minutes (FIG. 85), when minimum fluorescence was observed. For both the Flavivirus panel and the Dengue virus panel, background corrected fluorescence was normalized to target-specific fluorescence. Target specific fluorescence is the mean background corrected fluorescence of the no input (water) control with a given crRNA subtracted from the background corrected fluorescence of a given DNA target with the same crRNA at each time point.

[0683] For the analysis of ZIKV samples from the 2016 outbreak (FIG. 82), thresholds were used to determine the presence or absence of ZIKV. The SHERLOCK fluorescence threshold was determined using background-subtracted fluorescence from 5 samples: 4 single-donor healthy human urine samples and one no-input water control. Namely, for each sample s of these 5, Applicants took the mean ms and standard deviation σₛ of the fluorescence across 3 technical replicates. The threshold was set to the median of the 5 values {mₛ+3σₛ}. The threshold on amplicon PCR yield was determined using information from genome assemblies. First, the amplicon PCR yield was calculated for each sample by taking the minimum concentration from each of the two amplicon PCR pools (FIG. 87A). The objective is then to determine a yield that best predicts whether a particular targeted portion r of the genome is present in a sample (in this case, the RPA amplicon Applicants are detecting with SHERLOCK). The probability that r is present in a sample s, Prₛ(r), can be estimated as the fraction of the ZIKV genome that was sequenced and assembled from cDNA of s. (Calculating a probability across the genome is preferable to simply looking at whether there is coverage in the genome at r because lack of coverage does not necessarily indicate that r is not present.) The data for this analysis are from individual technical replicates from a recent genome sequencing study of the ZIKV outbreak (Metsky et al. 2017). A plot of amplicon PCR yield vs. fraction of the genome covered is shown in FIG. 87B. The values Prₛ(r) can be used to estimate precision and recall for a choice of threshold. In particular, an estimate of the number of samples that do have r is the sum of Prₛ(r) across all samples. Similarly, among the samples P whose amplicon PCR yield exceeds a given threshold, the number that are correctly labeled as having presence of r is estimated as the sum of Prₛ(r) across the samples in P. FIG. 87C shows precision and recall for each choice of threshold, as well as the F_{0.5} score, which is a composite metric that takes into account the threshold's ability to accurately classify samples as having the targeted portion of ZIKV. The amplicon PCR yield threshold was set to maximize the F_{0.5} score.

[0684] For SNP identification, background-subtracted fluorescence values were calculated using ancestral-targeting and derived-targeting crRNAs. Applicants took the ratio of the derived background-subtracted fluorescence to the ancestral background-subtracted fluorescence to determine the presence or absence of a SNP. For the HIV SNPs (FIG. 97), Applicants calculated the SNP identification index, which is the ratio of the fluorescence ratio for the derived allele divided by the fluorescence ratio for the ancestral allele. The SNP identification index is equal to 1 if there is no discriminatory power between the two alleles, and increases as the fluorescence ratios between the two alleles diverge.

[0685] ZIKV Detection Experiments.

[0686] PE243 seedstock cDNA was used at a stock concentration of 6.8×10⁴ cp/ul. cDNA was serially diluted 1:10 in ultrapure water (Life Technologies), or healthy urine (Lee Biosolutions). 4-8 μl of each sample was inactivated, and 1-2 l was used as input for RPA reactions. PE243 seedstock RNA was used at 2.72×10⁵ cp/ul. RNA was serially diluted 1:10 in ultrapure water (Life Technologies), or healthy urine (Lee Biosolutions). 4-8 μl of each sample was inactivated, and 1-2 μl was used as input for RPA reactions.

[0687] Cultured isolate, strain PRVABC59 (KU501215), was used for the viral particle experiments. PRVABC59 was cultured in insect and non-human primate cell lines and the original stock was purchased from ATCC (ATCC VR-1843).

[0688] Viral Panel Experiments.

[0689] For both the Flavivirus panel and Dengue virus panel, synthetically derived DNA templates were used as input at a concentration of 10⁴ copies/μL. A no input (water) control was used as a negative control for each of the crRNAs tested. In all experiments, the MgAc concentration in the RPA reaction was increased to 20 mM and three technical replicates were used.

[0690] For the Flavivirus panel, ZIKV template sequence was derived from (KX197192), DENV (NC_001477.1), WNV (NC_09942.1), and YFV (AY968065.1). The RPA reaction amplifies a portion of NS5 for these Flaviviruses.

[0691] For the Dengue virus panel, the DENV1 template sequence was derived from (KM204119.1), DENV2 (KM204118.1), DENV3 (KU050695.1), DENV4 (JQ822247.1). The RPA reaction amplifies a portion of the 3′UTR region of DENV1-4.

[0692] SNP Identification Experiments.

[0693] For region-specific SNP identification, synthetic templates containing 400-nt fragments of the ZIKV genome with ancestral or derived alleles were used to validate the performance of the SNP identification assay. In addition, ZIKV cDNA samples from 3 countries (USA, Honduras, and Dominican Republic) were used to confirm performance on mosquito pools and clinical samples. PE243 seedstock cDNA (KX197192.1) was used as an outgroup control at 300 cp/d. In addition, a no input (water) control was used. For the microcephaly-associated SNP identification experiments, synthetic templates containing a 400-nt fragment of the ZIKV genome with ancestral or derived alleles were used at 10⁴ cp/l, and PE243 seedstock cDNA was used at 300 cp/d. For the HIV drug resistance SNP identification experiments, synthetic templates containing 468-nt fragments of the HIV genome with ancestral or derived alleles were used at 10⁴ cp/d. In all SNP identification experiments, 3 technical replicates were used.

### Example 9—Programmable Cas13-Based Antiviral Therapeutics and Companion Diagnostics

[0694] Infectious diseases threaten our health and security, yet gold standard diagnostic and treatments have limited effectiveness and are based on decades-old science and systems. The vast majority of infectious diseases go undiagnosed and untreated, and outbreaks take far too long to detect. Nucleic-acid based diagnostics have been approved for only eleven viruses, and just nine viral diseases can be addressed with FDA-approved antiviral therapies (De Clercq and Li, 2016). This means we can diagnose and treat fewer than 10% of the viral pathogens known to infect humans (Hulo et al., 2011). Furthermore, viruses can rapidly evolve resistance to therapy, limiting the efficacy of our existing antiviral arsenal. There is an urgent need to develop new tools that can rapidly and accurately diagnose infectious illness anywhere in the world, identify and track both known and new infectious threats, and develop antiviral treatments that can be informed by diagnostics.

[0695] Applicants recently discovered CRISPR-Cas13 systems that can be leveraged to detect and cleave specific RNA sequences, and have demonstrated their potential applications for infectious diseases (Abudayyeh et al., 2016; Gootenberg et al., 2017). Cas13 is an RNA-guided, RNA-targeting CRISPR effector that exhibits ribonuclease activity upon RNA target recognition, such as pathogen nucleic acid. By programming CRISPR-Cas13 systems that directly target viral RNA, Applicants can develop highly-multiplexed antiviral therapies as well as viral diagnostics. CRISPR-Cas13 systems are thus primed for application to RNA viruses and could be a more specific alternative to qPCR diagnostics and shRNA therapeutics.

[0696] Here Applicants provide a new approach to addressing the described deficiencies in diagnosing and treating patients with viral infections. Applicants will use Cas13-based systems to develop programmable therapies to counter viral threats and prevent the evolution of drug resistance. In addition, Applicants will create fast, sensitive, and low-cost companion diagnostics to identify specific pathogen sequences, including specific polymorphisms (e.g. drug-resistant mutations). This will demonstrate a powerful, adaptive strategy to inhibit viral replication and will highlight the importance of Cas13 for developing new diagnostic and therapeutic applications. More broadly, similar approaches can position Cas13-based systems as a new frontline tool to both rapidly identify infectious agents and treat patients.

[0697] Antiviral drugs do not exist for most emerging viruses, and available direct-acting antivirals, which include small molecules, short interfering RNAs, and antibodies, typically target a small number of highly mutable viral proteins or RNAs. This is problematic because RNA viruses evolve rapidly, and can easily acquire resistance to existing therapeutics. Cas13-based systems offer highly multiplexed, programmable antiviral therapies that directly target viral RNA, and can be flexibly adapted to target novel viruses or emerging outbreak pathogens. Cas13-based therapies can be used in combination with existing antiviral compounds for viruses where such compounds exist, thereby reducing the prevalence of specific drug resistance mutations. Perhaps most importantly, if a virus evolves resistance to a specific Cas 13 guide RNA sequence, it is easy to switch to a different guide RNA sequence, or design a new guide sequence to target the new mutation. Such approaches should prevent the widespread development of resistance to Cas 13-based therapies and address a common challenge faced by current antiviral therapies.

[0698] Current gold-standard pathogen diagnostics are often expensive, slow, and lack sufficient sensitivity to detect viral infections. Standard molecular amplification methods, such as RT-qPCR, typically require nucleic acid extraction and expensive thermocycling machinery. Immunoassays, such as ELISAs, can only detect single targets, cross-react to antigenically similar targets, and cannot be quickly developed or updated to deal with new or evolving threats. The novel CRISPR-based platform (SHERLOCK) can transform the diagnosis of viral diseases with single-molecule detection sensitivity and single nucleotide polymorphism specificity (Gootenberg et al., 2017). Applicants can adapt SHERLOCK for use as a companion diagnostic to inform Cas13-based therapies. To do this, Applicants can reduce the turnaround time to <1 hour with high performance by adapting the technology to use clinical samples as input directly instead of purified nucleic acids. Furthermore, Applicants will develop specific Cas13-based diagnostics that will identify known or predicted therapy resistant mutations. These features will allow Cas13-based diagnostics to complement the therapeutic uses.

[0699] Cas13-based systems for the development of therapeutics may raise a concerns for potential off-target effects as has been noted for Cas9. Cas9's many applications relate to its ability to make edits in the DNA which then encode a permanent and heritable change. Cas13, in contrast, has different applications because it targets RNA, and the guide-directed changes are not heritable. Even though Cas13-directed changes are not heritable, Cas13 can still be used to regulate, detect, or image RNA molecules inside or outside of cells showcasing its strength as a tool for studying viral diseases.

[0700] Applicants will develop a set of Cas13 orthologs and corresponding guide RNA sequences that efficiently inhibit the replication of two mammalian viruses: Lymphocytic Choriomeningitis Virus (LCMV) and Influenza. In addition, Applicants will perform pilot experiments to test delivery methods for Cas13, screen for off-target activity of Cas13, and study viral evolution and guide-resistance in response to Cas13 therapy. Applicants will develop improved diagnostic protocols for rapid turnaround time, assay designs for detecting Influenza and differentiating between Influenza A, B, and C, and a lateral flow assay for instrument-free diagnostics.

[0701] The SHERLOCK diagnostic platform has the potential to revolutionize infectious disease testing, as a fast, broad-spectrum, field-deployable diagnostic. The evaluation of its technical progress and commercialization potential will be framed within the context of existing common diagnostic approaches, such as immunoassays and nucleic acid amplification strategies. Thus, at the stages of development we will evaluate its performance metrics, including sensitivity and specificity, time to results, cost per reaction, temperature stability, exogenous equipment requirements, and ease of use and interpretation. Preliminary results suggest that SHERLOCK will compare favorably to existing FDA approved pathogen diagnostic approaches.

[0702] There are five key technical challenges related to this approach: the efficacy of individual guide RNAs, the evolution of guide resistance, off-target nuclease activity, the ease of targeting influenza replication, and the sensitivity of companion Cas 13-based diagnostics.

[0703] The first technical challenge is to ensure a high efficacy of targeting viral genomes by individual guide RNAs. Unlike messenger RNAs, which are produced from the genome at specific rates determined by promoter strength, viral genomes replicate exponentially. To properly inhibit viral replication, Cas13-mediated cleavage activity must outweigh the rate of synthesis of new viral genomes. Applicants can apply two approaches to mitigate this risk and ensure highly effective genome cleavage: screening Cas13 orthologs to find orthologs with higher nuclease activity, and screening viral genomes to find optimal guide sequences. These results can be combined to yield even higher targeting efficiency. By optimizing for nuclease activity of Cas13 orthologs and screening optimal guide sequences, Applicants plan to achieve viral replication knock-down of at least 10-fold. By combining multiple guides simultaneously, Applicants plan to achieve a viral replication knockdown of at least 20-fold.

[0704] A second technical challenge is that viruses could evolve resistance to guide targeting. This could occur either by direct mutations in the target site, or via mutations in other parts of the genome that compensate for the effect of target cleavage. RNA viruses are known to have a relatively high mutation rate of approximately 10⁻⁴ substitutions per base per generation (Sanjuan et al., 2010). Given that the guide RNAs typically target a 28-nucleotide region of the viral genome, this means that the probability of a single mutation in a target region is approximately 3×10⁻³. Applicants know from previous characterization of Cas13 that two mutations in a target region are required to prevent target cleavage (Abudayyeh et al., 2016). Assuming the two mutations occur independently, the probability of guide resistance arising in a single region is approximately 10⁻⁵. These calculations illustrate the importance of guide pooling, as pools of guides should further decrease the probability of resistance evolution in a multiplicative fashion (e.g. for 2 guides: 10⁻¹⁰, for 3 guides, 10⁻¹⁵). In addition to guide pooling, Applicants will specifically address this challenge by sequencing viral populations before and after Cas13-based therapy to map the evolution (if present) of therapy resistance.

[0705] A third technical challenge is off-target nuclease activity by Cas13. Off-target nuclease activity is a concern because it could induce side effects in animal models or in patients. However, it is important to distinguish between the relative effects of off-target cleavage by Cas13 and Cas9. Since Cas9 targets DNA, any off-target cleavage events will lead to permanent changes to the genomes of affected cells. Cas13, however, targets RNA and therefore off-target cleavage will have only a transient effect on gene expression, as the half-life of messenger RNAs tends to be less than 24 hours (Yang et al., 2003). Despite this contrast between Cas13 and Cas9, Applicants have can sequence the transcriptomes of cells in the presence and absence of Cas13 cleavage to measure any off-target cleavage activity of Cas13. Specifically, Applicants will compare the off-target effects between Cas13 guides and siRNAs targeting the luciferase transcript by sequencing. If off-target effects are guide specific, then Applicants will also assess off-target effects of the best targeting guides. Applicants expect Cas13 to have at least 2-fold lower off-target cleavage activity than siRNAs.

[0706] A fourth technical challenge is the ability to target Influenza A. In contrast to LCMV, Influenza A replicates its genome in the nucleus of an infected cell and the genome is complexed with Influenza A proteins to form ribonucleoproteins (RNPs) (Knipe and Howley, 2007). Applicants can optimize the targeting of Influenza A through pilot experiments with a few guides that are derived from previously published shRNAs (Wang et al., 2017; Huang et al., 2017; Stoppani et al., 2015; Xu et al., 2015; Wang et al., 2016; McMillen et al., 2016) before proceeding to a comprehensive full-genome screen. Specifically, Applicants can optimize the localization of Cas13 (nucleus versus cytosol) and discern whether designing guides to target the positive sense mRNA is a more effective strategy as this RNA species is free from RNPs and could therefore more easily be targeted. If those strategies do not achieve the goal targeting efficiency, Applicants can fuse Cas13 with another protein to destabilize these RNPs, similar to strategies for altering Cas9's function through the creation of fusion proteins (Dominguez et al., 2016). Current nucleic acid targeting strategies for Influenza have included siRNAs, which have been reported to exhibit 80%-95% knockdown or at least a 5-fold reduction in Influenza replication in cell culture models (Huang et al., 2017; Xu et al., 2015). Applicants can achieve similar or increased levels of viral replication reduction, specifically >5 fold, using either a single guide or multiple guides targeting Influenza.

[0707] A final technical challenge is the sensitivity of the companion Cas13-based diagnostic. This is important to ensure that a virus can be detected before it becomes widespread in a patient. This is especially relevant in the context of therapy resistance mutations, which are initially difficult to detect at low frequencies, but much easier to detect at high frequencies. Unfortunately, by the time therapy resistance mutations reach high frequencies in a patient, the damage has already been done. A more sensitive, rapid Cas13-based diagnostic would enable faster detection. For these reasons, Applicants have set a very stringent threshold of 50 aM (25 copies per microliter) for the Cas13-based Influenza diagnostic. This threshold is substantially lower than the median Influenza A titer in nasal swabs, which is 10⁴ RNA copies per microliter (Ngaosuwankul et al., 2010).

### References

[0708] Abudayyeh, O. O., Gootenberg, J. S., Konermann, S., Joung, J., Slaymaker, I. M., Cox, D. B. T., Shmakov, S., Makarova, K. S., Semenova, E., Minakhin, L., et al. (2016). C2c2 is a single-component programmable RNA-guided RNA-targeting CRISPR effector. Science 353, aaf5573.
[0709] Andersen, K. G., Shapiro, B. J., Matranga, C. B., Sealfon, R., Lin, A. E., Moses, L. M., Folarin, O. A., Goba, A., Odia, I., Ehiane, P. E., et al. (2015). Clinical Sequencing Uncovers Origins and Evolution of Lassa Virus. Cell 162, 738-750.
[0710] Cong, L., Ran, F. A., Cox, D., Lin, S., Barretto, R., Habib, N., Hsu, P. D., Wu, X., Jiang, W., Marraffini, L. A., et al. (2013). Multiplex genome engineering using CRISPR/Cas systems. Science 339, 819-823.
[0711] De Clercq, E., and Li, G. (2016). Approved Antiviral Drugs over the Past 50 Years. Clin. Microbiol. Rev. 29, 695-747.
[0712] Dominguez, A. A., Lim, W. A., and Qi, L. S. (2016). Beyond editing: repurposing CRISPR-Cas9 for precision genome regulation and interrogation. Nat. Rev. Mol. Cell Biol. 17, 5-15.
[0713] Gire, S. K., Goba, A., Andersen, K. G., Sealfon, R. S. G., Park, D. J., Kanneh, L., Jalloh, S., Momoh, M., Fullah, M., Dudas, G., et al. (2014). Genomic surveillance elucidates Ebola virus origin and transmission during the 2014 outbreak. Science 345, 1369-1372.
[0714] Gootenberg, J. S., Abudayyeh, O. O., Lee, J. W., Essletzbichler, P., Dy, A. J., Joung, J., Verdine, V., Donghia, N., Daringer, N. M., Freije, C. A., et al. (2017). Nucleic acid detection with CRISPR-Cas13a/C2c2. Science 356, 438-442.
[0715] Huang, D. T.-N., Lu, C.-Y., Shao, P.-L., Chang, L.-Y., Wang, J.-Y., Chang, Y.-H., Lai, M.-J., Chi, Y.-H., and Huang, L.-M. (2017). In vivo inhibition of influenza A virus replication by RNA interference targeting the PB2 subunit via intratracheal delivery. PLoS One 12, e0174523.
[0716] Hulo, C., de Castro, E., Masson, P., Bougueleret, L., Bairoch, A., Xenarios, I., and Le Mercier, P. (2011). ViralZone: a knowledge resource to understand virus diversity. Nucleic Acids Res. 39, D576-D582.
[0717] Knipe, D. M., and Howley, P. M. (2007). Fields' Virology (Lippincott Williams & Wilkins).
[0718] McMillen, C. M., Beezhold, D. H., Blachere, F. M., Othumpangat, S., Kashon, M. L., and Noti, J. D. (2016). Inhibition of influenza A virus matrix and nonstructural gene expression using RNA interference. Virology 497, 171-184.
[0719] Metsky, H. C., Matranga, C. B., Wohl, S., Schaffner, S. F., Freije, C. A., Winnicki, S. M., West, K., Qu, J., Baniecki, M. L., Gladden-Young, A., et al. (2017). Zika virus evolution and spread in the Americas. Nature 546, 411-415.
[0720] Ngaosuwankul, N., Noisumdaeng, P., Komolsiri, P., Pooruk, P., Chokephaibulkit, K., Chotpitayasunondh, T., Sangsajja, C., Chuchottaworn, C., Farrar, J., and Puthavathana, P. (2010). Influenza A viral loads in respiratory samples collected from patients infected with pandemic H1N1, seasonal H1N1 and H3N2 viruses. Virol. J. 7, 75.
[0721] Ngo, N., Cubitt, B., Iwasaki, M., and de la Torre, J. C. (2015). Identification and Mechanism of Action of a Novel Small-Molecule Inhibitor of Arenavirus Multiplication. J. Virol. 89, 10924-10933.
[0722] Park, D. J., Dudas, G., Wohl, S., Goba, A., Whitmer, S. L. M., Andersen, K. G., Sealfon, R. S., Ladner, J. T., Kugelman, J. R., Matranga, C. B., et al. (2015). Ebola Virus Epidemiology, Transmission, and Evolution during Seven Months in Sierra Leone. Cell 161, 1516-1526.
[0723] Sanjuan, R., Nebot, M. R., Chirico, N., Mansky, L. M., and Belshaw, R. (2010). Viral Mutation Rates. J. Virol. 84, 9733-9748.
[0724] Stoppani, E., Bassi, I., Dotti, S., Lizier, M., Ferrari, M., and Lucchini, F. (2015). Expression of a single siRNA against a conserved region of NP gene strongly inhibits in vitro replication of different Influenza A virus strains of avian and swine origin. Antiviral Res. 120, 16-22.
[0725] Sullivan, B. M., Emonet, S. F., Welch, M. J., Lee, A. M., Campbell, K. P., de la Torre, J. C., and Oldstone, M. B. (2011). Point mutation in the glycoprotein of lymphocytic choriomeningitis virus is necessary for receptor binding, dendritic cell infection, and long-term persistence. Proc. Natl. Acad. Sci. U.S.A. 108, 2969-2974.
[0726] Wang, R., Zhang, Y.-Y., Lu, J.-S., Xia, B.-H., Yang, Z.-X., Zhu, X.-D., Zhou, X.-W., and Huang, P.-T. (2017). The highly pathogenic H5N1 influenza A virus down-regulated several cellular MicroRNAs which target viral genome. J. Cell. Mol. Med.
[0727] Wang, S., Chen, C., Yang, Z., Chi, X., Zhang, J., and Chen, J.-L. (2016). Targeted disruption of influenza A virus hemagglutinin in genetically modified mice reduces viral replication and improves disease outcome. Sci. Rep. 6, 23746.
[0728] Xu, F., Zhou, Y., Liu, Q., and Liu, G. (2015). RNA interference of influenza A virus replication by microRNA-adapted lentiviral loop short hairpin RNA. J. Gen. Virol. 96, 2971-2981.
[0729] Yang, E., van Nimwegen, E., Zavolan, M., Rajewsky, N., Schroeder, M., Magnasco, M., and Darnell, J. E., Jr (2003). Decay rates of human mRNAs: correlation with functional characteristics and sequence attributes. Genome Res. 13, 1863-1872.

### Example 10—Improved Cas13a/C2c2 Diagnostics for Viral Diarrheal Illness

[0730] Diarrheal diseases are responsible for over half a million deaths each year, the majority in children in the developing world (Walker C L, Rudan I, Liu L, et al. Global burden of childhood pneumonia and diarrhoea. Lancet 2013; 381:1405-16). Of these diseases, rotavirus is the leading cause of mortality, and other viruses like norovirus cause severe outbreaks around the world. These infections often go undiagnosed, or are misdiagnosed as bacteria leading to inappropriate treatment with antibiotics, worsening patient symptoms and promoting antibiotic resistance. To address this dire public health challenge, a rapid, inexpensive, and sensitive test is greatly needed for the diagnosis of viral diarrheal disease.

[0731] Applicants can use the recently discovered RNA guided, RNA-targeting nuclease Cas13a/C2c2 to create diarrheal illness diagnostics. Diagnostics are a crucial first step to treating patients, as they allow doctors to distinguish between bacterial and viral infections, thereby influencing treatment regimens. The CRISPR-Dx platform, termed SHERLOCK (Specific High Sensitivity Enzymatic Reporter UnLOCKing), is a sensitive and specific tool for nucleic acid detection that is cold chain independent and portable.

[0732] Using viral diarrheal illnesses as a model, Applicants can create a rapid, field-applicable diagnostic method based on the SHERLOCK technology. In many clinical settings, it takes over 48 hours to diagnosis viral diseases—if a diagnosis is even possible. With a few key technical enhancements on SHERLOCK, including shortening the total assay time to one hour and moving from a fluorescence-based readout to a colorimetric output, Applicants can create a test that can be run using a simple heat block and analyzed visually by a clinical worker. This will circumvent the need for samples to be shipped to a centralized testing lab, which is expensive, time-consuming, and can result in sample degradation. Such delays are especially critical during local or seasonal disease outbreaks, where rapid public health responses can prevent the further spread of an emerging infectious agent.

[0733] There are roughly 22 known virus families that infect humans and cause disease and this number is increasing due to continued population expansion (Woolhouse M E, Howey R, Gaunt E, Reilly L, Chase-Topping M, Savill N. Temporal trends in the discovery of human viruses. Proc Biol Sci 2008; 275:2111-5). Many of these diseases lack adequate diagnostics, the crucial first step to patient treatment. Current gold standard diagnostics like RT-qPCR and ELISA require specialized equipment, a cold chain, are time-consuming, and have a high overhead. Rapid antigen-based diagnostics have proven challenging to develop. Due to these limitations, there is an immense need for rapid, inexpensive, and sensitive diagnostic tools that can be used to detect specific viral pathogens in low-income settings and during outbreaks. Applicants can develop and improve viral diagnostics for diarrheal disease, one of the leading causes of childhood mortality. The new CRISPR-Cas13a/C2c2 system has the ability to quickly recognize and cleave specific RNA sequences derived from DNA or RNA (Abudayyeh O O, Gootenberg J S, Konermann S, et al. C2c2 is a single-component programmable RNA-guided RNA-targeting CRISPR effector. Science 2016; 353:aaf5573), making it an optimal system for viral diagnostics. Moreover, it is particularly suited for outbreaks because new tests can be designed and deployed in a matter of days.

[0734] Given SHERLOCK's high sensitivity and successful application to other infectious diseases, this detection platform is an ideal candidate for improving point of care diagnostic and developing a rapid, field deployable and multiplexed test for diarrheal viral pathogens. This approach will improve the diagnosis of severe disease, improve patient care, and decrease the inappropriate use of antibiotics.

[0735] One of the major limiting factors of existing diagnostic methods is the lag time between patient examination and laboratory results. For viruses like rotavirus and norovirus, such delays can have deadly effects. By increasing the rate of the Cas13a/C2c2 detection reaction, and developing detection protocols that do not require nucleic acid extraction, a “real-time” diagnostic can be achieved. Applicants can have a turnaround time of less than one hour from sample collection to results.

[0736] Commonly used nucleic acid detection tests such as RT-qPCR require an extraction prior to amplification due to PCR inhibitors in host material (serum, urine, stools). This is a significant limitation as extractions are time consuming and require a skilled technician. Thus, samples are typically handled in a centralized lab, and are not immediately processed. The isothermal amplification method used by SHERLOCK is not inhibited by host material, allowing for sample preparation protocols to directly amplify from urine and stool for rapid viral detection in the field.

[0737] Applicants will optimize the amplification speed via sequence design and by altering the composition of the detection reaction. Previous work has demonstrated that isothermal amplification primers have varying performance, so Applicants will screen at least ten primer pairs to identify those with improved performance. Applicants will optimize guide sequences in a similar fashion, as it has been shown that Cas13a/C2c2 has a preference for cleaving particular sequence motifs. Applicants will also optimize the T7 polymerase concentration, rNTP concentration, background RNA concentration, and magnesium concentration to further enhance the speed of detection. Current iterations of the detection reaction typically take over 2 hours to achieve sensitive nucleic acid detection, but with optimization can be reduced to less than one hour and possibly as low as thirty minutes.

### Developing a Colorimetric Readout for Visual Pathogen Detection

[0738] One of the biggest limiting factors to clinical diagnostics is the lack of robust infrastructure in many clinical settings worldwide. Current diagnostics often require expensive machines and high-level technical training, while in many clinics basic infrastructure like power is an issue. By moving the current Cas13a/C2c2 detection from a fluorescent output to a visual color-change Applicants can create a user-friendly diagnostic that can be performed by any healthcare worker without requiring an expensive and energy-consuming machine.

[0739] Applicants can use two different approaches for colorimetric detection: enzymatic reporters that produce colored products from colorless substrates (e.g. lacZ, peroxidase, beta glucoronidase) and clusters of gold nanoparticles linked by single-stranded RNA that can directly convert nuclease activity into a color change by deaggregating the nanoparticle population and causing a color shift as nanoparticles dissolve into solution. Applicants will carefully evaluate the performance of these two methods, especially as a readout on paper, as they have trade-offs with respect to speed and the ease of determining a color change. The best-performing approach will be tested using clinical samples to further validate its ability to report on the presence of specific nucleic acid sequences.

### Developing a Viral Pathogen Multiplex Diagnostic for Diarrheal Illness

[0740] Viruses that cause diarrhea including rotavirus, norovirus, Norwalk virus, cytomegalovirus and viral hepatitis often go undiagnosed. These viral infections lead to high mortality and morbidity and are often intensified by medications, such as antibiotics. Applicants can develop a multiplex diagnostic that can determine if a diarrheal infection is viral to help inform patient care, rapidly detect viral outbreaks, and decrease unneeded antibiotic use.

[0741] Clinical samples, from stool, urine, and blood, and viral seedstocks will be used to develop SHERLOCK for each pathogen. Applicants will design primer pairs and guides using multiple sequence alignments to account for nucleotide diversity within the binding region. Viral RNA will undergo a recombinase polymerase amplification (RPA) reaction, T7 RNA polymerase will be added to transcribe the amplified DNA to RNA, and Applicants will add the resulting RNA to a new reaction mix consisting of Cas13a and quenched fluorescent reporters and the colorimetric-based system for evaluation.

### Example 11—Use of HUDSON Protocol for Viral Detection Directly from Bodily Fluids

[0742] For SHERLOCK to excel at viral detection in any context, it should be paired with methods enabling direct detection from patient samples with a visual readout. We tested the performance of SHERLOCK for ZIKV and DENV detection on patient samples and developed HUDSON (Heating Unextracted Diagnostic Samples to Obliterate Nucleases), a method to enable rapid, sensitive detection of ZIKV and DENV directly from bodily fluids with a colorimetric readout, recently shown as part of SHERLOCKv2 (Gootenberg et al. Science doi:10.1126/science.aaq0179; 2018). Additionally, we designed SHERLOCK assays to distinguish multiple viral species and strains and identify clinically relevant mutations.

[0743] Detection of ZIKV and DENV in patient samples provides a stringent test of the sensitivity of SHERLOCK and its tolerance of viral diversity. Our ZIKV SHERLOCK assay had single-copy (1 cp/μl) sensitivity when tested on seedstock cDNA (FIG. 98). We evaluated its performance on 40 cDNAs derived from samples collected during the 2015-2016 ZIKV pandemic, 37 from patient samples with suspected ZIKV infections and 3 from mosquito pools (FIGS. 87, 99B, and Table 24). For 16 samples from these patients, we benchmarked SHERLOCK by comparing its sensitivity and specificity to other nucleic acid amplification tests including the commercially available Altona Realstar Zika Virus RT-PCR assay (FIGS. 82C, 88A-C, 99C, 100, 101, Table 25, and see Discussion). Of the 10 samples tested positive by the Altona assay, all 10 were detected by SHERLOCK (100% sensitivity); the other 6 samples were negative by both assays (100% specificity, 100% concordance). Our ZIKV assay had no false positives when tested on healthy urine and water (FIG. 99B). We then validated the ability of SHERLOCK to detect DENV, a related but more diverse flavivirus with similar symptoms to ZIKV infection. All 24 RT-PCR-positive DENV RNA samples were confirmed DENV positive after 1 hour of detection (FIGS. 99D, 102, 103, and Table 26). SHERLOCK sensitively and specifically detects viral nucleic acids extracted from ZIKV and DENV patient samples.

TABLE 24

| | | | | | Nucleic Acid | | |
|---|---|---|---|---|---|---|---|
| | | Specimen | | Positive by | Test | | |
| Sample | Country | type | Used in | SHERLOCK | Performed | Test result | |
| DOM_2016_BB-0054-URI | Dominican | Urine | FIG. 99, | FALSE | Aptima Zika | 30.77 | (S/CO) |
| | Republic | | FIG. 82, 87, | | Virus Assay | | |
| | | | 88, 100 | | | | |
| DOM_2016_BB-0054-SER | Dominican | Serum | FIG. 99, | * | Aptima Zika | 34.05 | (S/CO) |
| | Republic | | FIG. 100 | | Virus Assay | | |
| DOM_2016_BB-0059-URI | Dominican | Urine | FIG. 99, | TRUE | Aptima Zika | 33.67 | (S/CO) |
| | Republic | | FIG. 82, 87, | | Virus Assay | | |
| | | | 88, 100 | | | | |
| DOM_2016_BB-0059-SER | Dominican | Serum | FIG. 99 | FALSE | Aptima Zika | 35.07 | (S/CO) |
| | Republic | | FIG. 82, 87, | | Virus Assay | | |
| | | | 88, 100 | | | | |
| DOM_2016_BB-0071-SER | Dominican | Serum | FIG. 99, | TRUE | Aptima Zika | 34.57 | (S/CO) |
| | Republic | | FIG. 82, 87, | | Virus Assay | | |
| | | | 88, 100 | | | | |
| DOM_2016_BB-0071-URI | Dominican | Urine | FIG. 99, | * | Aptima Zika | 0 | (S/CO) |
| | Republic | | FIG. 100 | | Virus Assay | | |
| DOM_2016_BB-0076-SER | Dominican | Serum | FIG. 99, | TRUE | Aptima Zika | 33.45 | (S/CO) |
| | Republic | | FIG. 82, 87, | | Virus Assay | | |
| | | | 88, 100 | | | | |
| DOM_2016_BB-0076-URI | Dominican | Urine | FIG. 99, | TRUE | Aptima Zika | 36.68 | (S/CO) |
| | Republic | | FIG. 82, 87, | | Virus Assay | | |
| | | | 88, 100 | | | | |
| DOM_2016_BB-0085-URI | Dominican | Urine | FIG. 99, | TRUE | Aptima Zika | 0 | (S/CO) |
| | Republic | | FIG. 82, 87, | | Virus Assay | | |
| | | | 88, 100 | | | | |
| DOM_2016_BB-0085-SER | Dominican | Serum | FIG. 99, | * | Aptima Zika | 33.04 | (S/CO) |
| | Republic | | FIG. 100 | | Virus Assay | | |
| DOM_2016_BB-0091-SER | Dominican | Serum | FIG. 99, | TRUE | Aptima Zika | 31.8 | (S/CO) |
| | Republic | | FIG. 82, 87, | | Virus Assay | | |
| | | | 88, 100 | | | | |
| DOM_2016_BB-0115-SER | Dominican | Serum | FIG. 99, | TRUE | Aptima Zika | 27.78 | (S/CO) |
| | Republic | | FIG. 112, | | Virus Assay | | |
| | | | FIG. 82, 87 | | | | |
| | | | 88, 100 | | | | |
| DOM_2016_BB-0115-URI | Dominican | Urine | FIG. 99, | TRUE | None | N/A | |
| | Republic | | FIG. 87, | | | | |
| | | | 82, 88 | | | | |
| DOM_2016_BB-0127-SER | Dominican | Serum | FIG. 99, | TRUE | Aptima Zika | 32.95 | (S/CO) |
| | Republic | | FIG. 82, 87, | | Virus Assay | | |
| | | | 88, 100 | | | | |
| DOM_2016_BB-0180-SER | Dominican | Serum | FIG. 99, | TRUE | Aptima Zika | 31.93 | (S/CO) |
| | Republic | | FIG. 82, 87, | | Virus Assay | | |
| | | | 88, 100 | | | | |
| DOM_2016_BB-0180-URI | Dominican | Urine | FIG. 99, | FALSE | Aptima Zika | 36.8 | (S/CO) |
| | Republic | | FIG. 82, 87, | | Virus Assay | | |
| | | | 88, 100 | | | | |
| DOM_2016_BB-0183-SER | Dominican | Serum | FIG. 99, | TRUE | Aptima Zika | 33.64 | (S/CO) |
| | Republic | | FIG. 82, 87, | | Virus Assay | | |
| | | | 88, 100 | | | | |
| DOM_2016_BB-0183-URI | Dominican | Urine | FIG. 99, | FALSE | Aptima Zika | 0 | (S/CO) |
| | Republic | | FIG. 82, 87, | 88, 100 | Virus Assay | | |
| | | | 88, 100 | | | | |
| DOM_2016_BB-0184-URI | Dominican | Urine | FIG. 99, | TRUE | None | N/A | |
| | Republic | | FIG. 87, | | | | |
| | | | 82, 88 | | | | |
| USA_2016_FL-01-MOS | United | Mosquito | FIG. 82, 87, | TRUE | Faye-E (Faye, | * | |
| | States | Pool | 88, 100 | | O, 2008), gel | | |
| | | | | | electrophoresis | | |
| USA_2016_FL-02-MOS | United | Mosquito | FIG. 112, | TRUE | Faye-E (Faye, | * | |
| | States | Pool | FIG. 82, 87, | | O, 2008), gel | | |
| | | | 88, 100 | | electrophoresis | | |
| USA_2016_FL-03-MOS | United | Mosquito | FIG. 82, 87, | TRUE | Faye-E (Faye, | * | |
| | States | Pool | 88, 100 | | O, 2008), gel | | |
| | | | | | electrophoresis | | |
| USA_2016_FL-021-URI | United | Urine | FIG. 99, | TRUE | Faye-E (Faye, O, 2008) | Ct | 27.57 |
| | States | | FIG. 87, | | | | |
| | | | 82, 88 | | | | |
| USA_2016_FL-029-URI | United | Urine | FIG. 99, | FALSE | Faye-E (Faye, O, 2008) | Ct | 33.6 |
| | States | | FIG. 87, | | | | |
| | | | 82, 88 | | | | |
| USA_2016_FL-030-URI | United | Urine | FIG. 99, | TRUE | Faye-E (Faye, O, 2008) | Ct | 29.27 |
| | States | | FIG. 87, | | | | |
| | | | 82, 88 | | | | |
| HND_2016_HU-ME33-PLA | Honduras | Plasma | FIG. 99, | FALSE | Lanciotti | Ct | 33.35 |
| | | | FIG. 87, | | (Lanciotti, R. S. | | |
| | | | 82, 88 | | 2008) | | |
| HND_2016_HU-ME38-PLA | Honduras | Plasma | FIG. 99, | TRUE | Lanciotti | Ct | 29.95 |
| | | | FIG. 87, | | (Lanciotti, R. S. | | |
| | | | 82, 88 | | 2008) | | |
| HND_2016_HU-ME42-SER | Honduras | Serum | FIG. 99, | TRUE | Lanciotti | Ct | 33.45 |
| | | | FIG. 87, | | (Lanciotti, R. S. | | |
| | | | 82, 88 | | 2008) | | |
| HND_2016_HU-ME50-PLA | Honduras | Plasma | FIG. 99, | FALSE | Lanciotti | Ct | 33.45 |
| | | | FIG. 87, | | (Lanciotti, R. S. | | |
| | | | 82, 88 | | 2008) | | |
| HND_2016_HU-ME58-PLA | Honduras | Plasma | FIG. 99, | TRUE | Lanciotti | Ct | 33.55 |
| | | | FIG. 112, | | (Lanciotti, R. S. | | |
| | | | FIG. 87, | | 2008) | | |
| | | | 82, 88 | | | | |
| HND-2016_HU-ME59-PLA | Honduras | Plasma | FIG. 99, | TRUE | Lanciotti | Ct | 33.6 |
| | | | FIG. 87, | | (Lanciotti, R. S. | | |
| | | | 82, 88 | | 2008) | | |
| HND_2016_HU-ME131-PLA | Honduras | Plasma | FIG. 99, | TRUE | Lanciotti | Ct | 34.15 |
| | | | FIG. 87, | | (Lanciotti, R. S. | | |
| | | | 82, 88 | | 2008) | | |
| HND_2016_HU-ME136-PLA | Honduras | Plasma | FIG. 99, | FALSE | Lanciotti | Ct | 35.1 |
| | | | FIG. 87, | | (Lanciotti, R. S. | | |
| | | | 82, 88 | | 2008) | | |
| HND_2016_HU-ME137-PLA | Honduras | Plasma | FIG. 99, | FALSE | Lanciotti | Ct | 35.3 |
| | | | FIG. 83, 87, | | (Lanciotti, R. S. | | |
| | | | 88, 100 | | 2008) | | |
| HND-2016_HU-ME147-SER | Honduras | Serum | FIG. 99, | TRUE | Lanciotti | Ct | 34.15 |
| | | | FIG. 87, | | (Lanciotti, R. S. | | |
| | | | 82, 88 | | 2008) | | |
| HND_2016_HU-ME152-SER | Honduras | Serum | FIG. 99, | TRUE | Lanciotti | Ct | 33.9 |
| | | | FIG. 87, | | (Lanciotti, R. S. | | |
| | | | 82, 88 | | 2008) | | |
| HND_2016_HU-ME156-SER | Honduras | Serum | FIG. 99, | TRUE | Lanciotti | Ct | 34.15 |
| | | | FIG. 87, | | (Lanciotti, R. S. | | |
| | | | 82, 88 | | 2008) | | |
| HND_2016_HU-ME167-PLA | Honduras | Plasma | FIG. 99, | TRUE | Lanciotti | Ct | 32.9 |
| | | | FIG. 87, | | (Lanciotti, R. S. | | |
| | | | 82, 88 | | 2008) | | |
| HND-2016_HU-ME171-PLA | Honduras | Plasma | FIG. 99, | TRUE | Lanciotti | Ct | 34.85 |
| | | | FIG. 87, | | (Lanciotti, R. S. | | |
| | | | 82, 88 | | 2008) | | |
| HND_2016_HU-ME172-PLA | Honduras | Plasma | FIG. 99, | FALSE | Lanciotti | Ct | 34.25 |
| | | | FIG. 87, | | (Lanciotti, R. S. | | |
| | | | 82, 88 | | 2008) | | |
| HND_2016_HU-ME178-PLA | Honduras | Plasma | FIG. 99, | TRUE | Lanciotti | Ct | 34.35 |
| | | | FIG. 87, | | (Lanciotti, R. S. | | |
| | | | 82, 88 | | 2008) | | |
| HND_2016_HU-ME180-PLA | Honduras | Plasma | FIG. 99, | FALSE | Lanciotti | Ct | 33.25 |
| | | | FIG. 87, | | (Lanciotti, R. S. | | |
| | | | 82, 88 | | 2008) | | |
| HND_2016_HU-SZ76-SER | Honduras | Serum | FIG. 99, | FALSE | Lanciotti | Ct | 25.55 |
| | | | FIG. 87, | | (Lanciotti, R. S. | | |
| | | | 82, 88 | | 2008) | | |

TABLE 25

| | | | SHERLOCK | SHERLOCK | | |
|---|---|---|---|---|---|---|
| | | Specimen | flourescence | flourescence | Positive by | Positive by |
| Sample | Country | type | @3 h (mean) | @ 3 h (SD) | Hologic | Altona |
| DOM_2016_BB-0054-URI | Dominican | Urine | 40.3333333 | 23.11565126 | TRUE | FALSE |
| | Republic | | | | | |
| DOM_2016_BB-0054-SER | Dominican | Serum | 91.6666667 | 65.49300217 | TRUE | FALSE |
| | Republic | | | | | |
| DOM_2016_BB-0059-URI | Dominican | Urine | 114 | 70.4485628 | TRUE | FALSE |
| | Republic | | | | | |
| DOM_2016_BB-0059-SER | Dominican | Serum | 57987.6667 | 1704.081082 | TRUE | TRUE |
| | Republic | | | | | |
| DOM_2016_BB-0071-SER | Dominican | Serum | 114336 | 1429.226364 | TRUE | TRUE |
| | Republic | | | | | |
| DOM_2016_BB-0071-URI | Dominican | Urine | 58 | 46.13025038 | TRUE | FALSE |
| | Republic | | | | | |
| DOM_2016_BB-0076-URI | Dominican | Urine | 75539.3333 | 961.4345185 | TRUE | TRUE |
| | Republic | | | | | |
| DOM_2016_BB-0085-URI | Dominican | Urine | 29.3333333 | 43.01550108 | FALSE | FALSE |
| | Republic | | | | | |
| DOM_2016_BB-0085-SER | Dominican | Serum | 123215.333 | 14872.59511 | TRUE | TRUE |
| | Republic | | | | | |
| DOM_2016_BB-0091-SER | Dominican | Serum | 112993 | 2131.246349 | TRUE | TRUE |
| | Republic | | | | | |
| DOM_2016_BB-0115-SER | Dominican | Serum | 97830.6667 | 2968.648233 | TRUE | TRUE |
| | Republic | | | | | |
| DOM_2016_BB-0127-SER | Dominican | Serum | 80429.3333 | 6778.087218 | TRUE | TRUE |
| | Republic | | | | | |
| DOM_2016_BB-0180-SER | Dominican | Serum | 85652.6667 | 4965.606341 | TRUE | TRUE |
| | Republic | | | | | |

TABLE 26

| | | | | | Amplicon | Amplicon | |
|---|---|---|---|---|---|---|---|
| | | | SHERLOCK | SHERLOCK | PCR pool | PCR pool | Amplicon |
| | | Specimen | flourescence | flourescence | 1 conc. | 2 conc. | PCR yield |
| Sample | Country | type | @1 h (mean) | @1 h (SD) | (ng/ul) | (ng/ul) | (ng/ul) |
| DOM_2016_BB_0054-URI | Dominican Republic | Urine | 64 | 28.35489 | 0 | 0.3 | 0 |
| DOM_2016_BB_0059-URI | Dominican Republic | Urine | 4042.333 | 124.084 | 0.2 | 0.5 | 0.2 |
| DOM_2016_BB_0059-SER | Dominican Republic | Serum | 88 | 104.6518 | 2.7 | 3.4 | 2.7 |
| DOM_2016_BB_0071-SER | Dominican Republic | Serum | 456 | 103.0146 | 4.5 | 3.4 | 3.4 |
| DOM_2016_BB_0076-SER | Dominican Republic | Serum | 311.6667 | 38.00439 | 2.9 | 2.7 | 2.7 |
| DOM_2016_BB_0076-URI | Dominican Republic | Urine | 3114 | 570.8704 | 1.7 | 0 | 0 |
| DOM_2016_BB_0085-URI | Dominican Republic | Urine | 473.6667 | 50.80682 | 8.1 | 12.3 | 8.1 |
| DOM_2016_BB_0091-SER | Dominican Republic | Serum | 30426.67 | 7086.829 | 17.5 | 19 | 17.5 |
| DOM_2016_BB_0115-SER | Dominican Republic | Serum | 77020 | 16146.71 | 16.4 | 41.8 | 16.4 |
| DOM_2016_BB_0115-URI | Dominican Republic | Urine | 8701.667 | 2008.831 | 4.7 | 8 | 4.7 |
| DOM_2016_BB_0127-SER | Dominican Republic | Serum | 87383 | 923.0596 | 65.6 | 80 | 65.6 |
| DOM_2016_BB-0180-SER | Dominican | Serum | 80265 | 156.9044 | 6.4 | 8.2 | 6.4 |
| | Republic | | | | | | |
| DOM_2016_BB-0180-URI | Dominican | Urine | 41.33333 | 49.09515 | 4.5 | 0.1 | 4.5 |
| | Republic | | | | | | |
| DOM_2016_BB-0183-SER | Dominican | Serum | 8689 | 912.5004 | 11.9 | 15.7 | 11.9 |
| | Republic | | | | | | |
| DOM_2016_BB-0183-URI | Dominican | Urine | 62.66667 | 52.65295 | 0 | 0.1 | 0 |
| | Republic | | | | | | |
| DOM_2016_BB-0184-URI | Dominican | Urine | 3065.667 | 157.8618 | 0.3 | 0 | 0 |
| | Republic | | | | | | |
| USA_2016_FL-01-MOS | United | Mosquito | 35490 | 513.0731 | 38.9 | 144 | 58.9 |
| | States | Pool | | | | | |
| USA_2016_FL-02-MOS | United | Mosquito | 10314 | 115.1043 | 67.7 | 76.9 | 67.7 |
| | States | Pool | | | | | |
| USA_2016_FL-03-MOS | United | Mosquito | 60385.67 | 791.5013 | 69.8 | 87.5 | 69.8 |
| | States | Pool | | | | | |
| USA_2016_FL-021-URI | United | Urine | 16201 | 283.1042 | 8 | 10.2 | 8 |
| | States | | | | | | |
| USA_2016_FL-029-URI | United | Urine | 119 | 48.6621 | 0.7 | 1.29 | 0.7 |
| | States | | | | | | |
| USA_2016_FL-030-URI | United | Urine | 235.6667 | 53.52881 | 7.2 | 10.1 | 7.2 |
| | States | | | | | | |
| HND_2016_HU-ME33-PLA | Honduras | Plasma | 45 | 57.8619 | 2.7 | 1 | 1 |
| HND_2016_HU-ME38-PLA | Honduras | Plasma | 33957.33 | 687.6717 | 61.9 | 66.8 | 61.9 |
| HND_2016_HU-ME42-SER | Honduras | Serum | 20041.67 | 189.9746 | 28.3 | 38.6 | 28.3 |
| HND_2016_HU-ME50-PLA | Honduras | Plasma | 106.6667 | 23.15887 | 2.4 | 4.8 | 2.4 |
| HND_2016_HU-ME58-PLA | Honduras | Plasma | 12284 | 303.287 | 36.3 | 38.6 | 36.3 |
| HND_2016_HU-ME59-PLA | Honduras | Plasma | 7115 | 167.9196 | 14.2 | 1.7 | 14.2 |
| HND_2016_HU-ME131-PLA | Honduras | Plasma | 8452.333 | 97.72581 | 8.7 | 13.4 | 8.7 |
| HND_2016_HU-ME136-PLA | Honduras | Plasma | 35 | 6 | 1.1 | 3.3 | 1.1 |
| HND_2016_HU-ME137-PLA | Honduras | Plasma | 23.66667 | 23.43786 | 1 | 1.1 | 1 |
| HND_2016_HU-ME147-SER | Honduras | Serum | 4625.667 | 41.501 | 8.6 | 12.4 | 8.6 |
| HND_2016_HU-ME152-SER | Honduras | Serum | 2165 | 50.47772 | 14.7 | 20.7 | 14.7 |
| HND_2016_HU-ME154-SER | Honduras | Serum | 853.3333 | 163.0164 | 8.1 | 6.2 | 6.2 |
| HND_2016_HU-ME167-PLA | Honduras | Plasma | 15552.67 | 2654.519 | 16.7 | 34.1 | 16.7 |
| HND_2016_HU-ME171-PLA | Honduras | Plasma | 4832.667 | 832.8771 | 4.1 | 6.1 | 4.1 |
| HND_2016_HU-ME172-PLA | Honduras | Plasma | 171.3333 | 46.73685 | 1.9 | 2.9 | 1.9 |
| HND_2016_HU-ME178-PLA | Honduras | Plasma | 1108 | 47.0319 | 18.8 | 24.4 | 18.8 |
| HND_2016_HU-ME180-PLA | Honduras | Plasma | 82.66667 | 49.81298 | 6.2 | 4.9 | 4.9 |
| HND_2016_HU-SZ76-SER | Honduras | Serum | 110.3333 | 45.6545 | 0.8 | 0.5 | 0.5 |

[0744] Although SHERLOCK excels at detecting extracted nucleic acids, a field-deployable, rapid diagnostic test should not require an extraction step to detect viral nucleic acid in bodily fluids. Many viruses are shed in urine or saliva, including ZIKV and DENV, and sampling is not invasive (Paz-Bailey et al. N. Engl. J. Med doi:10.1056/NEJMoa1613108 (2017); Andries et al. PLoS Negl. Trop. Dis. 9, e0004100 (2015)). To detect viral nucleic acid directly from bodily fluids via SHERLOCK, we developed HUDSON, a method to lyse viral particles and inactivate the high levels of RNases found in bodily fluids using heat and chemical reduction (FIGS. 104A and 89) (Weickmann et al. J. Biol. Chem. 257:8705-8710 (1982)). HUDSON-treated urine or saliva could be directly added to RPA reactions without dilution or purification (blood products were diluted 1:3 to avoid solidification during heating), without inhibiting subsequent amplification or detection. HUDSON and SHERLOCK enabled sensitive detection of free ZIKV nucleic acid spiked into urine, whole blood, plasma, serum, or saliva (FIGS. 83A, 83B, 90A, 105, and 106). To mimic clinical infection, where viral nucleic acid is encapsulated in infectious particles, we spiked infectious ZIKV particles into bodily fluids. HUDSON combined with SHERLOCK (FIGS. 91 and 107) permitted sensitive detection of ZIKV RNA from infectious particles at 90 aM (45 cp/μl) in whole blood (FIG. 108) or serum (FIG. 104B), 0.9 aM (˜1 cp/μl) in saliva (FIG. 104C), and 20 aM (10 cp/μl) in urine. Total turnaround time was <2 h with fluorescent and colorimetric readout (FIGS. 104D and 114). The sensitivity of HUDSON and SHERLOCK is comparable to ZIKV RNA concentrations observed in patient samples, which range from 1-1,000 cp/l (Faye et al. J. Clin. Virol. 43:96-101 (2008); Paz-Bailey et al. N. Engl. J. Med. Doi:10.1056/NEJMoa1613108 (2017)). HUDSON, paired with the pan-DENV SHERLOCK assay, detected DENV in whole blood, serum, and saliva (FIGS. 109 and 110). DENV was detected directly from 8 of 8 patient serum samples (FIG. 104E) and 3 of 3 patient saliva samples tested (FIG. 104F), with a total turnaround time <1 hour from saliva despite lower viral titers than in serum (Andries et al. PLoS Negl. Trop. Dis. 9, e0004100 (2015)). We directly detected DENV with a colorimetric readout using lateral flow strips (FIG. 104G), showcasing a HUDSON to SHERLOCK pipeline that can detect ZIKV or DENV directly from bodily fluids with minimal equipment.

[0745] Because many genetically and antigenically similar flaviviruses co-circulate and have similar symptoms, we developed diagnostic panels to distinguish related viral species and serotypes. We identified conserved regions within ZIKV, DENV, West Nile virus (WNV), and yellow fever virus (YFV) genomes and designed a flavivirus panel with universal-flavivirus RPA primers that can amplify any of the 4 viruses, and species-specific crRNAs (FIG. 84A). This panel detected synthetic ZIKV, DENV, WNV, and YFV DNA targets with <0.22% off-target fluorescence (FIGS. 84B, 92, and see Methods), and identified the presence of all pairwise combinations of these 4 viruses, demonstrating the ability to detect mock co-infections (FIGS. 84B, 84C, and 93). We also designed a panel using DENV-specific RPA primers and serotype-specific crRNAs (FIG. 84D) that could distinguish between DENV serotypes 1-4 with <3.2% off-target fluorescence (FIGS. 84D, 79C, and 94). This low level of off-target fluorescence allows for 100% specificity in differentiating between serotypes, providing an alternative to current serotype identification approaches (Waggoner et al. J. Clin. Microbiol. 51:3418-3420 (2013)). The DENV panel confirmed the serotypes of 12 RT-PCR-serotyped patient samples or clinical isolates (FIGS. 84D and 111), and identified 2 clinical isolates with mixed infection, a commonly observed phenomenon (Requena-Castro et al. Mem. Inst. Oswaldo Cruz. 112:520-522 (2017)). SHERLOCK can therefore be extended to differentiate between related viruses or serotypes using a single amplification reaction.

[0746] SHERLOCK is uniquely poised for field-deployable variant identification, which would allow real-time tracking of microbial threats. Genotyping of single nucleotide polymorphisms (SNPs) typically involves PCR and either fluorescent- or mass spectrometry-based detection, requiring extensive sample processing, expensive equipment, and limiting field-deployability (Kim et al. Annu. Rev. Biomed. Eng. 9:289-320 (2007)). SHERLOCK can identify SNPs by placing a synthetic mismatch in the crRNA near the SNP, testing each target with an ancestral-specific and derived-specific crRNA (FIG. 112A) (Gootenberg et al. Science 356:438-442 (2017)). We designed diagnostics for 3 region-specific SNPs from the 2015-2016 ZIKV pandemic (FIG. 112B) and identified these SNPs in synthetic targets, a viral seedstock, and cDNA samples from Honduras, the Dominican Republic, and the United States (FIG. 112C-E). These results demonstrate that SHERLOCK can identify SNPs in samples from the ZIKV pandemic and highlight the single-nucleotide specificity of SHERLOCK.

[0747] Rapid identification of emerging drug resistance and other clinically relevant mutations for viruses such as ZIKV and HIV would have great utility. A ZIKV point mutation in the PrM region (S139N) recently associated with fetal microcephaly was used as a test case for the rapid development of assays for variant identification (Yuan et al. Science eaam7120 (2017)). Within a week of the report's publication (FIGS. 112F and 113), we developed multiple SHERLOCK assays for the S139N mutation (FIGS. 96 and 112G), and could identify the mutation in patient samples from the 2015-2016 ZIKV pandemic with a visual readout (FIG. 112H). To further illustrate the ease of developing SHERLOCK diagnostics for many clinically relevant mutations, we designed and tested assays for the six most commonly observed drug-resistance mutations in HIV reverse transcriptase (Rhee et al. Nucleic Acids Res. 31:298-303 (2003)) in 1 week (FIG. 97). These examples underscore that SHERLOCK could be used for monitoring clinically relevant variants in near real time.

[0748] Combining HUDSON and SHERLOCK, we have created a field-deployable viral diagnostic platform with high performance and minimal equipment or sample processing requirements. This platform is as sensitive and specific as amplification-based nucleic acid diagnostics (Piepenburg et al. PLoS Biol. 4, e204 (2006)); Yu et al. Angew. Chem. Int. Ed Engl. 56, 992-996 (2017); Eboigbodin et al. Diagn. Microbiol. Infect. Dis. 86:369-371 (2016); Pardee et al. Cell 165:1255-1266 (2016); Chotiwan et al. Sci. Transl. Med. 9 (2017) doi:10.1126/scitranslmed.aag0538; Van Ness et al. PNAS 100:4504-4509 (2003)), with similar speed and equipment requirements to rapid antigen tests (Bosch et al. Sci. Transl. Med 9 (2017), doi:10.1126/scitrtanslmed.aan1589; Balmaseda et al. PNAS USA 114:8384-8389 (2017); Priyamvada et al. PNAS USA 113:7852-7857 (2016)). Furthermore, this approach can be easily adapted to detect virtually any virus present in bodily fluids, scaled to enable multiplexed detection (Gootenberg et al. Science doi:10.1126/science.aaq0179 (2018)), and the reagents can be lyophilized for cold-chain independence (Gootenberg et al. Science 356:438-442 (2017)). Cas13-based detection is a promising next-generation diagnostic strategy with the potential to be implemented almost anywhere in the world to enable effective, rapid diagnosis of viral infections.

### Materials and Methods

[0749] Clinical Samples/Ethics Statement.

[0750] Clinical samples used for this study were from clinical studies evaluated and approved by the Institutional Review Boards/Ethics Review Committees at Hospital General de la Plaza de la Salud (Santo Domingo, Dominican Republic), Florida Department of Health (Tallahassee, Fla.), and Universidad Nacional Autonoma de Honduras (Tegucigalpa, Honduras). Massachusetts Institute of Technology (MIT) Institutional Review Board/Ethics Review Committee and the Office of Research Subject Projection at the Broad Institute provided approval for use of samples collected by the previously listed institutions. For the dengue virus clinical samples, The Broad Institute Institutional Review Board/Ethics Review Committee provided approval for the use of the samples.

[0751] Zika virus (ZIKV) clinical samples were collected during the 2015-2016 Zika pandemic and tested at collaborating sites with either the Hologic Aptima ZIKV assay, or published ZIKV RT-PCR or RT-qPCR assays depending on the collaborating site. The nucleic acid testing and results are reported in Table 24. Extracted RNA from these collected clinical samples were prepared for metagenomic and targeted sequencing and genomes published previously (Metsky et al. Nature 546:411-415 (2017)) and cDNA from these 40 preparations were used as input for comparing SHERLOCK and to amplicon PCR performance. Extracted RNA from 16 of these samples were also tested using the Altona RealStar Zika virus RT-PCR kit, details of the assay are found below and the samples tested and their results are reported in Table 25.

[0752] Confirmed positive dengue virus (DENV) patient serum samples were excess from the comparative genomics of DENV for the Broad Institute Viral Genomics Initiative. In addition, four confirmed DENV positive patient serum samples and three matched saliva samples were obtained from Boca Biolistics. Extracted RNA from DENV RT-PCR positive human serum samples, and clinical isolates were excess from the comparative genomics of DENV for the Broad Institute Viral Genomics Initiative. Clinical isolates were prepared by culturing human serum on C6/36 cells and harvesting RNA from the cell supernatant with the RNA extraction protocol outlined below.

[0753] Production of LwCas13a and crRNAs.

[0754] LwCas13a was purified as described in-house (Gootenberg et al. Science 356:438-442 (2017)) or by Genscript. crRNA DNA templates were annealed to a T7 promoter oligonucleotide at a final concentration of 10 LM in 1×Taq reaction buffer (NEB). This involved 5 minutes of denaturation at 95° C. followed by an anneal at 5° C. per minute down to 4° C. crRNAs were transcribed in vitro using the HiScribe T7 High Yield RNA Synthesis Kit (NEB). Transcriptions were performed according to the manufacturer's instructions for short RNA transcripts, with the volume scaled to 30 μl. Reactions were incubated overnight at 37° C. Transcripts were purified using RNAClean XP beads (Beckman Coulter) with a 2× ratio of beads to reaction volume and an additional supplementation of 1.8× isopropanol. Some crRNAs were synthesized by Integrated DNA Technologies (IDT).

[0755] Sample Preparation.

[0756] Viral RNA was extracted from 140 l of input material using the QIAamp Viral RNA Mini Kit (QIAGEN) with carrier RNA according to the manufacturer's instructions. Samples were eluted in 60 μl of nuclease free water and stored at −80° C. until use.

[0757] To produce cDNA, 5 μl of extracted RNA was converted into single-stranded cDNA using methods published previously (Matranga et al. Genome Biol. 15:519 (2014)). In short, RNA was reverse transcribed with SuperScript III (Invitrogen) and random hexamer primers. RNA-DNA duplexes were then degraded with RNase H. cDNA was stored at −20° C. until use. In some experiments (FIGS. 99C and 100), reverse transcription was performed using SuperScript IV for 20 minutes at 55° C., without RNase H treatment.

[0758] A single cultured isolate, ZIKV Pernambuco (isolate PE243, KX197192.1), was used as a positive control or as a control for the ancestral sequence in ZIKV detection experiments. Viral RNA was extracted from 140 μl of the seed stock sample using the RNA extraction method described above.

[0759] RNase inactivation of urine samples was performed by addition of TCEP/EDTA and heating samples. TCEP and EDTA were added to urine samples at final concentrations of 100 mM and 1 mM respectively. Two protocols were used: 1-step inactivation at 95° C. for 10 minutes, or 2-step inactivation at 50° C. for 20 minutes followed by 95° C. for 5 minutes. Inactivations were performed using a thermocycler or a dry heat block.

[0760] RNase inactivation of Zika virus in whole blood, plasma, serum, and saliva samples was performed by addition of TCEP/EDTA and heating samples. TCEP and EDTA were added to urine samples at final concentrations of 100 mM and 1 mM respectively. A 2-step inactivation at 50° C. for 5 minutes followed by 64° C. for 5 minutes (blood products or saliva), or 50° C. for 20 minutes followed by 95° C. for 5 minutes (urine) was used. Inactivations were performed using a thermocycler or a dry heat block.

[0761] RNase inactivation of DENV in whole blood, serum, and saliva samples was performed by addition of TCEP/EDTA and heating samples. TCEP and EDTA were added to urine samples at final concentrations of 100 mM and 1 mM respectively. A 2-step inactivation at 42° C. (or in some experiments, 37° C.) for 20 minutes followed by 64° C. for 5 minutes was used. Inactivations were performed using a thermocycler.

[0762] RPA Reactions and Primer Design.

[0763] For RPA reactions, the Twist-Dx RT-RPA kit was used according to the manufacturer's instructions. Primer concentrations were 480 nM. For amplification reactions involving RNA, Murine RNase inhibitor (NEB M3014L) was used at a final concentration of 2 units per microliter. All RPA reactions were 20 minutes unless otherwise stated.

[0764] For ZIKV detection, RPA primers RP819/RP821 from a recent publication were used (Gootenberg et al. Science 356:438-442 (2017)). For pan-DENV detection, irrespective of serotype, an equal mix of published RPA primers DENV1-3-RPA-RP4/DENV1-3-RPA-FP13 and DENV4-RPA-RP2/DENV4-RPA-FP3 were used (Abd El Wahed et al. PLoS One 10, e0129682 (2015)). For the flavivirus panel, RPA primers FLAVI-NS5fwd-1/FLAVI-NS5rev-1 were used. For the DENV panel to differentiate between serotypes, RPA primers DENV-3UTRfwd-1/DENV-3UTRrev-1 were used. For region-specific Zika SNP detection, RPA primers DOMUSA-5249-fwd/DOMUSA-5249-rev (DOMUSA5249 SNP), USA-935-fwd/USA-935-rev (USA935 SNP), and HND-2788-fwd/HND-2788-rev (HND2788 SNP) were used. For detecting a Zika SNP associated with microcephaly, RPA primers ZIKV-mcep-fwd and ZIKV-mcep-rev were used. For detecting drug-resistance SNPs in HIV reverse transcriptase, RPA primers HIVRT-149F/HIVRT-348R (K65R, K103N, and V106M SNPs), and HIV-462F/HIVRT-601R (Y181C, M184V, and G190A SNPs) were used. For a complete list of RPA primer names and sequences, see Table 28.

TABLE 27
Metadata for DENV Patient Samples and Clinical Isolates.
We show a variety of information for the 24 DENV RNA samples,
8 serum patient samples, 3 saliva samples including country
of origin, sample type, and figure(s) used in.

| Sample | Country | Specimen type | Used in |
|---|---|---|---|
| 2207_SER | Columbia | RNA (serum) | FIG. 99, |
| | | | FIG. 84, |
| | | | FIG. 103, |
| | | | 111 |
| 3736_SER | Columbia | RNA (serum) | FIG. 99, |
| | | | FIG. 103 |
| 3739_SER | Columbia | RNA (serum) | FIG. 99, |
| | | | FIG. 103 |
| 3742_SER | Columbia | RNA (serum) | FIG. 99, |
| | | | FIG. 103 |
| 3745_SER | Columbia | RNA (serum) | FIG. 99, |
| | | | FIG. 103 |
| 3754_SER | Columbia | RNA (serum) | FIG. 99, |
| | | | FIG. 103 |
| 3764_SER | Columbia | RNA (serum) | FIG. 99, |
| | | | FIG. 103 |
| 3766_SER | Columbia | RNA (serum) | FIG. 99, |
| | | | FIG. 103 |
| 2280_SER | Columbia | RNA (serum) | FIG. 99, |
| | | | FIG. 103 |
| 148_ISO | Columbia | RNA (clinical | FIG. 99, |
| | | isolate) | FIG. 84, |
| | | | FIG. 103, |
| | | | FIG. 111 |
| 141_ISO | Columbia | RNA (clinical | FIG. 99, |
| | | isolate) | FIG. 84, |
| | | | FIG. 103, |
| | | | FIG. 111 |
| 142_ISO | Columbia | RNA (clinical | FIG. 99, |
| | | isolate) | FIG. 103 |
| 16646_ISO | Mexico | RNA (clinical | FIG. 99, |
| | | isolate) | FIG. 84, |
| | | | FIG. 103, |
| | | | FIG. 111 |
| 18565_ISO | Mexico | RNA (clinical | FIG. 99, |
| | | isolate) | FIG. 103 |
| 18574_ISO | Mexico | RNA (clinical | FIG. 99, |
| | | isolate) | FIG. 84, |
| | | | FIG. 103, |
| | | | FIG. 111 |
| 18719_ISO | Mexico | RNA (clinical | FIG. 99, |
| | | isolate) | FIG. 84, |
| | | | FIG. 103, |
| | | | FIG. 111 |
| 18720_ISO | Mexico | RNA (clinical | FIG. 99, |
| | | isolate) | FIG. 84, |
| | | | FIG. 103, |
| | | | FIG. 111 |
| 20593_ISO | Mexico | RNA (clinical | FIG. 99, |
| | | isolate) | FIG. 103 |
| 20697_ISO | Mexico | RNA (clinical | FIG. 99, |
| | | isolate) | FIG. 84, |
| | | | FIG. 103, |
| | | | FIG. 111 |
| P1_SER | Peru | RNA (serum) | FIG. 99, |
| | | | FIG. 84, |
| | | | FIG. 103, |
| | | | FIG. 111 |
| P2_SER | Peru | RNA (serum) | FIG. 99, |
| | | | FIG. 84, |
| | | | FIG. 103, |
| | | | FIG. 111 |
| P7_SER | Peru | RNA (serum) | FIG. 99, |
| | | | FIG. 84, |
| | | | FIG. 103, |
| | | | FIG. 111 |
| P155_SER | Peru | RNA (serum) | FIG. 99, |
| | | | FIG. 84, |
| | | | FIG. 103, |
| | | | FIG. 111 |
| P164_SER | Peru | RNA (serum) | FIG. 99, |
| | | | FIG. 103 |
| BB_20544_SER | Peru | Serum | FIG. 104 |
| BB_20545_SER | Peru | Serum | FIG. 104 |
| BB_20547_SER | Peru | Serum | FIG. 104 |
| BB_20553_SER | Peru | Serum | FIG. 104 |
| BB_20545_SAL | Peru | Saliva | FIG. 104 |
| BB_20547_SAL | Peru | Saliva | FIG. 104 |
| BB_20553_SAL | Peru | Saliva | FIG. 104 |
| RPDen06/74 | Brazil | Serum | FIG. 104 |
| VDen06/27 | Brazil | Serum | FIG. 104 |
| RPDen05/31 | Brazil | Serum | FIG. 104 |
| RPDen08/293 | Brazil | Serum | FIG. 104 |

TABLE 28
List of RPA primer sequences used in this study.
Forward primers contain the T7 promoter sequence
primer gaaatTAATACGACTCACTATAggg) at their 5′ end.

| | | | |
|---|---|---|---|
| RP819 | FIG. 99, FIG. | gaaatTAATACGACTCACTATAGGGCGTGGCGCACTAC | Gootenberg et |
| | 104, FIGS. 87, | ATGTACT (SEQ. ID. No. 925) | al. 2017 |
| | 98, 100, FIGS. | | |
| | 83, 105, 106, | | |
| | FIG. 108, FIG. | | |
| | 114 | | |
| RP821 | FIG. 99, FIG. | TGTCAATGTCAGTCACCACTATTCCATCCA | Gootenberg et |
| | 104, FIGS. 87, | (SEQ. ID. No. 926) | al. 2017 |
| | 98, 100, FIGS. | | |
| | 83, 105, 106, | | |
| | FIG. 108, FIG. | | |
| | 114 | | |
| DENV1-3- | FIG. 99, FIG. | gaaatTAATACGACTCACTATAgggAACAGCATATTGA | Abd El |
| RPA-RP4 | 104, FIG. 102 | CGCTGGGAGAGACCAGAGATC (SEQ. ID. | Wahed, A. et. |
| | FIG. S7, FIG. | No. 927) | al. 2015 |
| | S18 | | |
| DENV1-3- | FIG. 99, FIG. | ATTCAACAGCACCATTCCATTTTCTGGCGTTCTGTG | Abd El |
| RPA- | 104, FIG. 102, | (SEQ. ID. No. 928) | Wahed, A. et. |
| FP13 | FIG. S7, FIG. | | al. 2015 |
| | S18 | | |
| DENV4- | FIG. 99, FIG. | gaaatTAATACGACTCACTATAgggCACAAAAACAGCA | Abd El |
| RPA-RP2 | 104, FIG. 102, | TATTGACGCTGGGAAAG (SEQ. ID. No. 929) | Wahed, A. et. |
| | FIG. S7, FIG. | | al. 2015 |
| | S18 | | |
| DENV4- | FIG. 99, FIG. | CATCTTGCGGCGCTCTGTGCCTGGATTGA | Abd El |
| RPA-FP3 | 104, FIG. 102, | (SEQ. ID. No. 930) | Wahed, A. et. |
| | FIG. 103, FIG. | | al. 2015 |
| | 110 | | |
| FLAVI- | FIG. 84, FIGS. | gaaatTAATACGACTCACTATAGGGGTACAACATGAT | This study |
| NS5fwd-1 | 84, 92, 93 | GGGGAARAGAGARAARAA (SEQ. ID. No. 931) | |
| FLAVI- | FIG. 84, FIGS. | CGKGTGTCCCAGCCNGCKGTGTCATCWGCA | This study |
| NS5rev-1 | 84, 92, 93 | (SEQ. ID. No. 932) | |
| DENV- | FIG. 84 FIGS. | gaaatTAATACGACTCACTATAGGGTTGAGCAAACCG | This study |
| 3UTRfwd-1 | 79, 94, 111 | TGCTGCCTGTAGCTCC (SEQ. ID. No. 933) | |
| DENV- | FIG. 84, FIGS. | GGGAGGGGTCTCCTCTAACCRCTAGTC | This study |
| 3UTRrev-1 | 79, 94, 111 | (SEQ. ID. No. 934) | |
| DOMUSA- | FIG. 112 | gaaatTAATACGACTCACTATAG | This study |
| 5249-fwd | | GGACTGTCTTAGACTTGCATCCTGGAGCTGGG | |
| | | (SEQ. ID. No. 935) | |
| DOMUSA- | FIG. 112 | CTTCCTCCATTTCAGCAGCGACAACCCTGG | This study |
| 5249-rev | | (SEQ. ID. No. 936) | |
| USA-935- | FIG. 112 | gaaatTAATACGACTCACTATAGGGTAGAGTCGAAAA | This study |
| fwd | | TTGGATATTCAGGAACCC (SEQ. ID. No. 937) | |
| USA-935- | FIG. 112 | AACCCAAGTCCCACCTGACATACCTTCCAC | This study |
| rev | | (SEQ. ID. No. 938) | |
| HND- | FIG. 112 | gaaatTAATACGACTCACTATAGGGTGGAAGAGAATG | This study |
| 2788-fwd | | GAGTTCAACTGACGGTCG (SEQ. ID. No. 939) | |
| HND- | FIG. 112 | GAAGTGCGATTTCCCCCAAGCCTTCCAGCC | This study |
| 2788-rev | | (SEQ. ID. No. 940) | |
| ZIKV- | FIG. 112, | gaaatTAATACGACTCACTATAGGGTACTAGTGTCGG | This study |
| mcep-fwd | FIG. 96 | AATTGTTG (SEQ. ID. No. 941) | |
| ZIKV- | FIG. 112 | TAACACTTATTCATCCCCAATGTGGTTG | This study |
| mcep-rev | FIG. 96 | (SEQ. ID. No. 942) | |
| HIVRT- | FIG. 97 | gaaatTAATACGACTCACTATAgggTTGGGCCTGAAAA | This study |
| 149F | | TCCATACAATACTCCAG (SEQ. ID. No. 943) | |
| HIVRT- | FIG. 97 | AAAATATGCATCACCCACATCCAGTACTG | This study |
| 348R | | (SEQ. ID. No. 944) | |
| HIVRT- | FIG. 97 | gaaatTAATACGACTCACTATAgggAGGATCACCAGCA | This study |
| 462F | | ATATTCCAAAGTAGCATG (SEQ. ID. No. 945) | |
| HIVRT- | FIG. 97 | TTGTTCTATGCTGCCCTATTTCTAAGTCAG | This study |
| 601R | | (SEQ. ID. No. 946) | |

[0765] Cas13 Detection Reactions and crRNA Design.

[0766] Detection reactions were performed as described (Gootenberg et al. Science 356:438-442 (2017)), except that background RNA input per reaction was reduced from 100 to 0-25 ng. This increases the reaction rate without introducing any spurious cleavage of the reporter oligonucleotide. Unless indicated otherwise, RNase Alert v2 (Thermo) was used as the reporter. Biotek microplate readers (Synergy H4, Neo2, and Cytation 5) were used for measuring fluorescence of the detection reaction. Fluorescence kinetics were monitored using a monochromator with excitation at 485 nm and emission at 520 nm with a reading every 5 minutes for up to 3 hours. We did not observe significant differences in sensitivity between the different machines; machines were thus utilized interchangeably. Fluorescence values reported were background subtracted or template-specific values. Time point reported is noted in the figure captions.

[0767] For ZIKV detection, the crRNA “Zika targeting crRNA 2” from a recent publication was used (Gootenberg et al. Science 356:438-442 (2017)). For pan-DENV detection irrespective of serotype, an equal mix of 3 crRNAs and D1-3UTRat10660, D2/3-3UTrat10635, D4-3UTRat10620 were used. For the flavivirus panel, crRNAs ZIKV-NS5at9227 (ZIKV), DENV-NS5at9127 (DENV), WNV-NS5at9243 (WNV), and YFV-NS5at9122 (YFV) were used. For the DENV panel to differentiate between serotypes, crRNAs D1-3UTRat10457 (DENV1), D2-3UTRat10433 (DENV2), D3-3UTRat10419 (DENV3), and D4-3UTRat10366 (DENV4) were used. For region-specific Zika SNP detection, crRNAs DOMUSA-5249-ancestral/DOMUSA-5249-derived (DOMUSA5249 SNP), USA-935-ancestral/USA-935-derived (USA935 SNP), and HND-2788-ancestral/HND-2788-derived (HND2788 SNP) were used. For detecting a Zika SNP associated with microcephaly, crRNAs ZIKV-mcep-snp3 syn5-ancestral/ZIKV-mcep-snp3syn5-derived (design shown in FIG. 112F), and crRNAs ZIKV-mcep-snp7-ancestral/ZIKV-mcep-snp7-derived (design shown in FIG. 105) were used. For detecting drug-resistance SNPs in HIV reverse transcriptase, crRNAs HIVRT-K65R-ancestral/HIVRT-K65R-derived (K65R SNP), HIVRT-K103N-ancestral/HIVRT-K103N-derived (K103N SNP), HIVRT-V016M-ancestral/HIVRT-V106M-derived (V106M SNP), HIVRT-Y181C-ancestral/HIVRT-Y181C-derived (Y181C SNP), HIVRT-M184V-ancestral/HIVRT-M 184V-derived (M184V SNP), and HIVRT-G190A-ancestral/HIVRT-G190A-derived (G190A SNP) were used. For a complete list of crRNA names and spacer sequences, see Table 29. For additional discussion of the effect of crRNA sequence and secondary structure on activity, see the Discussion.

TABLE 29
List of crRNA spacer sequences
used in this study. All crRNAs
used in this study contain
the same direct repeat sequence
(GAUUUAGACUACCCCAAAAACGAAGGGGACUAAAAC).
A 5′ GGG for increased
yield during T7 in vitro transcription
is encoded in the T7 promoter
sequence primer (gaaatTAATACGACTCACTATAggg).

| | | Spacer | |
|---|---|---|---|
| crRNA Name | Used in | Sequence | Reference |
| Zika targeting | FIG. 99, FIG. 104, | (SEQ. ID. | Gootenberg |
| crRNA 2 | FIG. 87, 98, 100, | No. 949) | et al. |
| | FIG. 83, 105, 106, | | 2017 |
| | FIG. 108, FIG. 114 | | |
| D1-3UTRat10660 | FIG. 99, FIG. 104, | (SEQ. ID. | This study |
| | FIG. 102, FIG. 103, | No. 950) | |
| | FIG. 110 | | |
| D2/3- | FIG. 99, FIG. 104, | (SEQ. ID. | This study |
| 3UTRat10635 | FIG. 102, FIG. 103, | No. 951) | |
| | FIG. 110 | | |
| D4-3UTRat10620 | FIG. 99, FIG. 104, | (SEQ. ID. | This study |
| | FIG. 102, FIG. 103, | No. 952) | |
| | FIG. 110 | | |
| ZIKV-NS5at9227 | FIG. 84, FIG. 84, | (SEQ. ID. | This study |
| | 92, 93 | No. 953) | |
| DENV-NS5at9127 | FIG. 84, FIG. 84, | (SEQ. ID. | This study |
| | 92, 93 | No. 954) | |
| WNV-NS5at9243 | FIG. 84, FIG. 84, | (SEQ. ID. | This study |
| | 92, 93 | No. 955) | |
| YFV-NS5at9122 | FIG. 84, FIG. 84, | (SEQ. ID. | This study |
| | 92, 93 | No. 956) | |
| D1-3UTRat10457 | FIG. 84, FIG. 79, | (SEQ. ID. | This study |
| | 94, 111 | No. 957) | |
| D2-3UTRat10433 | FIG. 84, FIG. 79, | (SEQ. ID. | This study |
| | 94, 111 | No. 958) | |
| D3-3UTRat10419 | FIG. 84, FIG. 79, | (SEQ. ID. | This study |
| | 94, 111 | No. 959) | |
| D4-3UTRat10366 | FIG. 84, FIG. 79, | (SEQ. ID. | This study |
| | 94, 111 | No. 960) | |
| DOMUSA-5249- | FIG. 112 | (SEQ. ID. | This study |
| ancestral | | No. 961) | |
| DOMUSA-5249- | FIG. 112 | (SEQ. ID. | This study |
| derived | | No. 962) | |
| USA-935-ancestral | FIG. 112 | (SEQ. ID. | This study |
| | | No. 963) | |
| USA-935-derived | FIG. 112 | (SEQ. ID. | This study |
| | | No. 964) | |
| HND-2788- | FIG. 112 | (SEQ. ID. | This study |
| ancestral | | No. 965) | |
| HND-2788-derived | FIG. 112 | (SEQ. ID. | This study |
| | | No. 966) | |
| ZIKV-mcep- | FIG. 112, FIG. 96 | (SEQ. ID. | This study |
| snp3syn5-derived | | No. 967) | |
| ZIKV-mcep- | FIG. 112, FIG. 96 | (SEQ. ID. | This study |
| snp3syn5- | | No. 968) | |
| ancestral | | | |
| ZIKV-mcep-snp7- | FIG. 112, FIG. 96 | (SEQ. ID. | This study |
| ancestral | | No. 969) | |
| ZIKV-mcep-snp7- | FIG. 112, FIG. 96 | (SEQ. ID. | This study |
| derived | | No. 970) | |
| HIVRT-K65R- | FIG. 97 | (SEQ. ID. | This study |
| ancestral | | No. 971) | |
| HIVRT-K65R- | FIG. 97 | (SEQ. ID. | This study |
| derived | | No. 972) | |
| HIVRT-K103N- | FIG. 97 | (SEQ. ID. | This study |
| ancestral | | No. 973) | |
| HIVRT-K103N- | FIG. 97 | (SEQ. ID. | This study |
| derived | | No. 974) | |
| HIVRT-V106M- | FIG. 97 | (SEQ. ID. | This study |
| ancestral | | No. 975) | |
| HIVRT-V106M- | FIG. 97 | (SEQ. ID. | This study |
| derived | | No. 976) | |
| HIVRT-Y181C- | FIG. 97 | (SEQ. ID. | This study |
| ancestral | | No. 977) | |
| HIVRT-Y181C- | FIG. 97 | (SEQ. ID. | This study |
| derived | | No. 978) | |
| HIVRT-M184V- | FIG. 97 | (SEQ. ID. | This study |
| ancestral | | No. 979) | |
| HIVRT-M184V- | FIG. 97 | (SEQ. ID. | This study |
| derived | | No. 980) | |
| HIVRT-G190A- | FIG. 97 | (SEQ. ID. | This study |
| ancestral | | No. 981) | |
| HIVRT-G190A- | FIG. 97 | (SEQ. ID. | This study |
| derived | | No. 982) | |

[0768] Lateral Flow Detection Reactions.

[0769] Lateral flow detection was achieved using a custom probe oligonucleotide (LF-polyU, see Table 30 for the sequence) with commercially available detection strips (Milenia Hybridetect 1, TwistDx, Cambridge, UK). Cas13 detection reactions were diluted 1:5 in Hybridetect Assay Buffer, then the strips were inserted and incubated for 5 minutes at room temperature. The strips were then removed and photographed using a smartphone camera.

TABLE 30
List of synthetic target sequences and RNA
reporters used in this study.
All synthetic targets were ordered as gBlocks
from IDT, and contain the 25 nucleotide T7 pro-
moter sequence primer sequence
(gaaatTAATACGACTCACTATAggg) at their 5′ end.
This allows for in vitro transcription of the
gBlock, either before or after RPA amplification.
Fluorescent reporters were ordered as HPLC-
purified RNA oligonucleotides from IDT.

| | | | Refer- |
|---|---|---|---|
| Name | Used in | Sequence | ence |
| ZIKV_strt8924 | FIG. 84, FIGS. | (SEQ. ID. | This |
| | 84, 92, 93 | No. 984) | study |
| DENV_strt8284 | FIG. 84, FIGS. | (SEQ. ID. | This |
| | 84, 92, 93 | No. 985) | study |
| WNV_strt8940 | FIG. 84, FIGS. | (SEQ. ID. | This |
| | 84, 92, 93 | No. 986) | study |
| YFV_strt8897 | FIG. 84, FIGS. | (SEQ. ID. | This |
| | 84, 92, 93 | No. 987) | study |
| DENV1_strt10264 | FIG. 84, FIGS. | (SEQ. ID. | This |
| | 79, 94, 111 | No. 988) | study |
| DENV2_strt10251 | FIG. 84 FIGS. | (SEQ. ID. | This |
| | 79, 94, 111 | No. 989) | study |
| DENV3_strt10224 | FIG. 84, FIGS. | (SEQ. ID. | This |
| | 79, 94, 111 | No. 990) | study |
| DENV4_strt10181 | FIG. 84 FIGS. | (SEQ. ID. | This |
| | 79, 94, 111 | No. 991) | study |
| DOMUSA 5249 an- | FIG. 112 | (SEQ. ID. | This |
| cestral target | | No. 992) | study |
| DOMUSA 5249 de- | FIG. 112 | (SEQ. ID. | This |
| rived target | | No. 993) | study |
| USA 935 ances- | FIG. 112 | (SEQ. ID. | This |
| tral target | | No. 994) | study |
| USA 935 derived | FIG. 112 | (SEQ. ID. | This |
| target | | No. 995) | study |
| HND 2788 ances- | FIG. 112 | (SEQ. ID. | This |
| tral target | | No. 996) | study |
| HND 2788 de- | FIG. 112 | (SEQ. ID. | This |
| rived target | | No. 997) | study |
| ZIKV mcep ances- | FIG. 112, | (SEQ. ID. | This |
| tral target | FIG. 96 | No. 998) | study |
| ZIKV mcep de- | FIG. 112, | (SEQ. ID. | This |
| rived target | FIG. 96 | No. 999) | study |
| HIVRT aa48-203 | FIG. 97 | (SEQ. ID. | This |
| ancestral target | | No. 1000) | study |
| HIVRT aa48-203 | FIG. 97 | (SEQ. ID. | This |
| K65R target | | No. 1001) | study |
| HIVRT aa48-203 | FIG. 97 | (SEQ. ID. | This |
| K103N target | | No. 1002) | study |
| HIVRT aa48-203 | FIG. 97 | (SEQ. ID. | This |
| V106M target | | No. 1003) | study |
| HIVRT aa48-203 | FIG. 97 | (SEQ. ID. | This |
| Y181C target | | No. 1004) | study |
| HIVRT aa48-203 | FIG. 97 | (SEQ. ID. | This |
| M184V target | | No. 1005) | study |
| HIVRT aa48-203 | FIG. 97 | (SEQ. ID. | This |
| G190A target | | No. 1006) | study |
| LF-polyU | FIG. 104, FIG. | /56-FAM/ | This |
| | 112, FIG. 114 | UUUUUUUU | study |
| | | UUUUUU/3Bio/ | |
| | | (SEQ. ID. | |
| | | No. 1007) | |

[0770] RT-PCR Experiments.

[0771] RT-PCR for ZIKV detection was performed using the Altona Real Star Zika Virus RT-PCR Kit (RUO version) according to the manufacturer's specifications on a Lightcycler 96 RT-PCR machine (Roche). Ten μl of ZIKV RNA extracted from patient samples was used as an input for RT-PCR. One μl of internal control (IC) was used for each sample.

[0772] Data Analysis.

[0773] Background subtraction was performed by subtracting the fluorescence values after 0 minutes (FIGS. 98, 99D, 102, 103), 10 minutes (FIGS. 84, 99B-C, and 104) or 20 minutes (FIG. 112), when minimum fluorescence was observed. For both the flavivirus panel and the DENV panel, background subtracted fluorescence was normalized to target-specific fluorescence. Target specific fluorescence is the mean background subtracted fluorescence of the no input (water) control with a given crRNA subtracted from the background subtracted fluorescence of a given DNA target with the same crRNA at each time point.

[0774] For the analysis of ZIKV samples from the 2015-2016 pandemic (FIG. 99B), thresholds were used to determine the presence or absence of ZIKV. The ZIKV SHERLOCK fluorescence threshold was determined using background subtracted fluorescence from 5 negative control samples: 4 single-donor healthy human urine samples and one no-input water control. Namely, for each sample s of these 5, we took the mean ms and standard deviation σₛ of the fluorescence across 3 technical replicates. The threshold was set to the median of the 5 values {mₛ+3σₛ}. For FIG. 1C, the same calculation {mₛ+3σₛ} was performed using 1 no input control to determine the threshold. The threshold on amplicon PCR yield was determined using information from genome assemblies. First, the amplicon PCR yield was calculated for each sample by taking the minimum concentration from each of the two amplicon PCR pools (FIG. 87A). The objective is then to determine a yield that best predicts whether a particular targeted portion r of the genome is present in a sample (in this case, the RPA amplicon we are detecting with SHERLOCK). The probability that r is present in a sample s, Prₛ(r), can be estimated as the fraction of the ZIKV genome that was sequenced and assembled from cDNA of s. (Calculating a probability across the genome is preferable to simply looking at whether there is coverage in the genome at r because lack of coverage does not necessarily indicate that r is not present.) The data for this analysis are from individual technical replicates from a recent genome sequencing study of the ZIKV pandemic (Metsky et al. Nature 546:411-415 (2017)). A plot of amplicon PCR yield vs. fraction of the genome covered is shown in FIG. 88B. The values Prₛ(r) can be used to estimate precision and recall for a choice of threshold. In particular, an estimate of the number of samples that do have r is the sum of Prₛ(r) across all samples. Similarly, among the samples P whose amplicon PCR yield exceeds a given threshold, the number that is correctly labeled as having presence of r is estimated as the sum of Prₛ(r) across the samples in P. FIG. 87C shows precision and recall for each choice of threshold, as well as the F0.5 score, which is a composite metric that takes into account the threshold's ability to accurately classify samples as having the targeted portion of ZIKV. The amplicon PCR yield threshold was set to maximize the F0.5 score. For additional discussion of the sensitivity and specificity of SHERLOCK compared to amplicon PCR and other methods, see the Discussion.

[0775] DENV SHERLOCK fluorescence threshold was calculated similarly as described above with the ZIKV assay. Background subtracted fluorescence from 8 no input negative controls were used to determine the threshold. For each no input control s of these 8, we took the mean ms and standard deviation σₛ of the fluorescence across 3 technical replicates and the threshold was set to the median of the 8 values {mₛ+_3σₛ}.

[0776] For multivirus or serotype panels, we calculated off-target fluorescence for each target against the other crRNAs in the panel. This was performed by calculating the percentage of target-specific fluorescence for an unmatched target:crRNA pair relative to the target-specific fluorescence observed for the matching target: crRNA pair at the 3 hour detection time point (when maximum fluorescence was observed or signal had saturated). Off-target fluorescence reported in the text was the maximum observed for the 4 targets in a given panel.

[0777] For SNP identification, background subtracted fluorescence values were calculated using ancestral-targeting and derived-targeting crRNAs. We took the ratio of the derived background-subtracted fluorescence to the ancestral background-subtracted fluorescence to determine the presence or absence of a SNP. For the HIV SNPs (FIG. 106), we calculated the SNP identification index, which is the ratio of the fluorescence ratio for the derived allele divided by the fluorescence ratio for the ancestral allele. The SNP identification index is equal to 1 if there is no discriminatory power between the two alleles, and increases as the fluorescence ratios between the two alleles diverge. For additional discussion of the factors influencing the ease of differentiating individual SNPs using SHERLOCK, see the Discussion.

[0778] ZIKV and DENV Detection Experiments.

[0779] PE243 (MF352141.1) seedstock cDNA was used at a stock concentration of 6.8×10⁴ cp/μl. cDNA was serially diluted 1:10 in ultrapure water (Life Technologies), or healthy urine (Lee Biosolutions). 4-8 l of each sample was inactivated, and 1-2 l was used as input for RPA reactions. PE243 seedstock RNA was used at 2.72×10⁵ cp/μl. The virus was originally isolated from a febrile patient with rash on May 13, 2015, and Vero cell passages were done at the FIOCRUZ Pemambuco laboratory (E. Marques), in Brazil in 2016 and at MIT Gehrke laboratory. PE243 is one of the first isolates from the Zika epidemic in Brazil (Donald et al. PLoS Negl. Trop. Dis. 10, e0005048 (2016)). RNA was serially diluted 1:10 in ultrapure water (Life Technologies), or healthy urine (Lee Biosolutions). 4-8 l of each sample was inactivated, and 1-2 μl was used as input for RPA reactions. We used 14 mM MgAc for DENV detection and 17 mM MgAc for ZIKV detection.

[0780] A cultured isolate, ZIKV strain PRVABC59 (KU501215) from Puerto Rico (Donald et al. PLoS Negl. Trop. Dis. 10, e0005048 (2016); Lanciotti et al. Emerg. Infect. Dis. 22:933-935 (2016)) was acquired through the BEI repository in USA cat number ATCC VR-1843 and used for addition of virus to healthy urine, saliva, whole blood, and serum samples. PRVABC59 was cultured in insect and non-human primate cell lines. HuH-7 human hepatoma cells were used for deriving the infectious particles in the virus stock as described (Lambeth et al. J. Clin. Microbiol. 43:3267-3272 (2005)). A cultured isolate, DENV2 strain New Guinea C (NGC) was used for dilution of virus in healthy saliva (Lee Biosolutions), whole blood (Research Blood Components), and serum (Millipore Sigma).

[0781] Viral Panel Experiments.

[0782] In order to account for the sequence diversity between 4 different viruses in the flavivirus family (ZIKV, DENV, WNV, and YFV), we applied the method CATCH (Compact Aggregation of Targets for Comprehensive Hybridization) to search for conserved regions that would be suitable for a pan-flavivirus RPA primer pair. An implementation of this method is available on GitHub under the MIT license (https://github.com/broadinstitute/catch). This method allowed us to narrow our search for primer pairs within a conserved region of NS5.

[0783] For initial testing of the flavivirus panel and DENV panel, synthetically derived DNA templates were used as input at a concentration of 10⁴ copies/μl. A no input (water) control was used as a negative control for each of the crRNAs tested. In all panel experiments, 3 technical replicates were used. In all flavivirus panel experiments, the MgAc concentration in the RPA reaction was 20 mM while in all DENV panel experiments MgAc concentration in the RPA was 14 mM.

[0784] For initial testing of the flavivirus panel, ZIKV template sequence was derived from (KX197192), DENV (NC_001477.1), WNV (NC_09942.1), and YFV (AY968065.1). The RPA reaction amplifies a portion of NS5 for these flaviviruses.

[0785] For initial testing of the DENV panel, the DENV1 synthetic template sequence was derived from (KM204119.1), DENV2 (KM204118.1), DENV3 (KU050695.1), DENV4 (JQ822247.1). The RPA reaction amplifies a portion of the 3′ UTR region of DENV 1-4. The DENV panel was additionally tested on extracted RNA from clinical samples and seed stocks.

[0786] SNP Identification Experiments.

[0787] For region-specific SNP identification, synthetic templates containing 400-nt fragments of the ZIKV genome with ancestral or derived alleles were used to validate the performance of the SNP identification assay. In addition, ZIKV cDNA samples from 3 countries (USA, Honduras, and Dominican Republic) were used to confirm performance on mosquito pools and clinical samples. See Table 24 for additional information about these cDNA samples. PE243 seedstock cDNA (KX197192.1) was used as an outgroup control at 300 cp/l. In addition, a no input (water) control was used. For the microcephaly-associated SNP identification experiments, synthetic templates containing a 400-nt fragment of the ZIKV genome with ancestral or derived alleles were used at 104 cp/μl, and PE243 seedstock cDNA was used at 300 cp/μl. For the HIV drug resistance SNP identification experiments, synthetic templates containing 468-nt fragments of the HIV genome with ancestral or derived alleles were used at 104 cp/μl. For a complete list of synthetic template names and sequences, see Table 30. In all SNP identification experiments, 3 technical replicates were used.

### Discussion

[0788] Discussion of the Sensitivity and Specificity of SHERLOCK for ZIKV Detection.

[0789] We have shown that SHERLOCK is a very sensitive and specific method for nucleic acid detection. ZIKV detection was a key test of SHERLOCK's sensitivity, in large part because the ZIKV is notoriously challenging to detect due to low viral titers and sample degradation (Paz-Bailey et al. N. Engl. J. Med. Doi:10.1056NEJMoa1613108 (2017)). We tested a set of 37 suspected positive patient samples and 3 mosquito pools from the 2015-16 ZIKV pandemic with both SHERLOCK and amplicon PCR to determine the presence or absence of ZIKV nucleic acid in a given sample. For 16 samples from these patient, we were able to compare SHERLOCK to two FDA-EUA-approved ZIKV diagnostics: 1) Hologic Aptima ZIKV assay, and 2) Altona RealStar Zika Virus RT-PCR assay.

[0790] To compare SHERLOCK and the Altona RealStar Zika Virus RT-PCR assay, we compared both assays on a set of 16 patient samples. We performed the two assays such that the reverse transcription conditions and input volumes were equivalent: 20 minute reverse transcription and 10 l input. cDNA is diluted 1:4 from the RNA input due to the reverse transcription reaction conditions, thus the amount of RNA that we are using for SHERLOCK is ¼ the amount used by the Altona kit. We observed equal sensitivity between the two methods, with 10 of 16 samples positive by each method and 100% concordance overall (FIGS. 99C and 100).

[0791] We then compared SHERLOCK and the Altona assay to the Hologic Aptima Zika Virus Assay, which uses a much larger input volume (>500 μl). All 10 samples positive by both the Altona assay and SHERLOCK were positive by the Hologic assay (Table 25). Three samples were positive by the Hologic assay but not the other two assays, likely due to the >50× larger sample input volume for the Hologic assay. In conclusion, SHERLOCK has equivalent sensitivity to RT-PCR assays for ZIKV detection, and its sensitivity relative to the Hologic assay is limited by the input volume.

[0792] Our rationale for including amplicon PCR data was based on our observations while performing wide-scale genome sequencing during the ZIKV pandemic (Metsky et al. Nature 546:411-415 (2017)) that partial genomes were very common. This suggested that a genome-wide comparator would offer higher sensitivity than single-amplicon approaches such as RT-PCR. With the amplicon PCR approach, we quantified the amplicon PCR products using an Agilent tapestation and selected a threshold of 2 ng/μl for determining the presence or absence of ZIKV, which maximizes accuracy as measured by genome sequence coverage of the amplicon PCR product (FIG. 100, see Methods for details). There was high concordance (82.5%) between the two methods despite differences between the regions of the ZIKV genome they target (FIGS. 84C and 88A-C). The amplicon PCR method tiles the entire ZIKV genome, whereas SHERLOCK uses only one amplicon that at 128 nt long is shorter than the 300-400 nt long PCR amplicons (FIG. 101). Thus, it is possible for highly degraded samples (with short RNA fragments) to be more readily detected by SHERLOCK than by amplicon PCR. Conversely, if the SHERLOCK amplicon itself has degraded but other parts of the genome have not, then amplicon PCR will detect the remaining portions of the genome present in a sample.

[0793] This sensitivity of SHERLOCK is paired with high specificity. We have shown SNP-sensitivity, serotype identification, and species-level specificity using various SHERLOCK assays. We have also tested numerous negative controls, including healthy bodily fluids, water, and in some cases nucleic acid from other viruses. Based on these results, we do not expect to observe many false-positives (if any) using SHERLOCK.

[0794] Causes of Variability in SHERLOCK Performance.

[0795] As discussed in the supplementary text of the original SHERLOCK paper, RPA performance is highly variable and depends on the template sequence, amplicon length, and other factors (Gootenberg et al. Science 356:438-442 (2017)). The Cas13 detection step amplifies fluorescent signals by a factor of 100 to 1,000 or more, depending on the input concentration of the RPA amplicon. As a result, SHERLOCK is fairly robust to variation in either RPA amplification or Cas13 detection, unless this variation is very large in magnitude.

[0796] To design multivirus and multi-serotype panels, we used degenerate RPA primers to capture the remarkable sequence diversity of related RNA viruses. In some cases, primer degeneracy can lead to variable amplification efficiency for different targets. In general, this can be managed by optimizing the RPA reaction (adjusting primer and magnesium concentrations, etc.).

[0797] In addition to RPA variation, we have observed some variation in the Cas13 detection step of SHERLOCK due to the effects of spacer GC content, stretches of polyUs, and secondary structure on crRNA performance. Some crRNAs are more active than others, and some crRNAs show more activity in absence of target (i.e. no input controls). We have also observed that some crRNAs are less pure than others after in vitro transcription. After purification, however, almost all crRNAs are highly active (with a few exceptions due to undesirable secondary structure of the spacers, such as when most of the spacer can pair with itself).

[0798] The lower ZIKV fluorescence in the flavivirus panel (FIG. 84B) may be due a combination of the factors discussed above (likewise for other crRNAs used in this study).

[0799] Factors Influencing SNP Discrimination by SHERLOCK.

[0800] Different spacer RNA sequences were observed to have different levels of performance in the detection step of SHERLOCK. Factors that lead to these differences in performance were discussed above, but there are also implications related to SNP detection.

[0801] SNP detection relies on a pair of crRNAs that differ from a target sequence by one or two nucleotides, and thus have differential activity on a target molecule that is sequence-dependent. SNP discrimination is successful when the presence of a 2nd mismatch between the crRNA and target RNA leads to observable differences in collateral cleavage. Therefore, the following could limit the success of SNP discrimination:
[0802] A single additional mismatch in a highly active crRNA may not reduce activity sufficiently for strong discrimination and has been observed for some crRNAs. Possible solutions include 1) diluting the RPA product prior to addition to the detection reaction, or 2) using a lower crRNA concentration.
[0803] If one allele amplifies preferentially to the other during the RPA (due to a change in the secondary structure of the template), this could bias the output of SHERLOCK. We have not observed this, but it is a possibility.
[0804] Wobble pairing of RNA will allow for some crRNAs to bind weakly in the absence of Watson-Crick base pairing. This has been observed for some of our A>G or G>A mutations (e.g. USA935). A “U” in the crRNA can bind to either the derived or ancestral nucleotide. However, even in this scenario it is easy to distinguish the two alleles as the G-targeting crRNA will contain a C nucleotide, which will not pair with A.

[0805] Given these limitations, crRNAs with lower activity (which can be achieved by shortening the spacer) could be better suited for SNP detection, and although wobble base pairing can have an effect on SHERLOCK's signal it will not completely abolish SNP identification.

[0806] Various modifications and variations of the described methods, pharmaceutical compositions, and kits of the invention will be apparent to those skilled in the art without departing from the scope and spirit of the invention. Although the invention has been described in connection with specific embodiments, it will be understood that it is capable of further modifications and that the invention as claimed should not be unduly limited to such specific embodiments. Indeed, various modifications of the described modes for carrying out the invention that are obvious to those skilled in the art are intended to be within the scope of the invention. This application is intended to cover any variations, uses, or adaptations of the invention following, in general, the principles of the invention and including such departures from the present disclosure come within known customary practice within the art to which the invention pertains and may be applied to the essential features herein before set forth.

1. A nucleic acid detection system comprising:
a CRISPR system comprising an effector protein and one or more guide RNAs designed to bind to corresponding target molecules; and
a RNA-based masking construct;
wherein the target molecules comprise one or more viral target molecules.

2. A polypeptide detection system comprising:
a CRISPR system comprising an effector protein and one or more guide RNAs designed to bind to a trigger RNA;
a RNA-based masking construct; and
one or more detection aptamers comprising a masked RNA polymerase promoter binding site or a masked primer binding site.

3. A method for detecting viruses in samples, comprising:
distributing a sample or set of samples into one or more individual discrete volumes, the individual discrete volumes comprising the CRISPR system of claim 1;
incubating the sample or set of samples under conditions sufficient to allow binding of the one or more guide RNAs to one or more target molecules;
activating the CRISPR effector protein via binding of the one or more guide RNAs to the one or more target molecules, wherein activating the CRISPR effector protein results in modification of the RNA-based masking construct such that a detectable positive signal is generated; and
detecting the detectable positive signal, wherein detection of the detectable positive signal indicates a presence of one or more viruses in the sample.

4. The method of claim 3, wherein the sample comprises two or more viruses, and wherein the method distinguishes between the two or more viruses.

5. The method of claim 3, wherein the guide RNAs detect single nucleotide variants of the one or more viruses; and wherein the guide RNAs optionally further comprise one or more synthetic mismatches.

6. (canceled)

7. The method of claim 3, wherein the guide RNAs of the one or more CRISPR systems comprise a pan-viral guide RNA set that detects each virus and/or viral strain in a set of viruses; and wherein the guide RNAs are optionally derived using a set cover approach.

8. (canceled)

9. A method of detecting viruses, comprising:
exposing the CRISPR system of claim 1 to a sample;
activating the RNA effector protein via binding of the one or more guide RNAs to the one or more microbe-specific target RNAs or one or more trigger RNAs such that a detectable positive signal is produced; and
detecting the detectable positive signal, wherein detection of the detectable positive signal indicates a presence of one or more viruses in the sample.

10. The method of claim 9, wherein the CRISPR system is on a substrate, and wherein the substrate is exposed to the sample; optionally wherein the substrate is a flexible materials substrate; optionally a paper substrate, a fabric substrate, or a flexible polymer-based substrate.

11. The method of claim 10, wherein the same or a different CRISPR system is applied to multiple discrete locations on the substrate.

12. (canceled)

13. (canceled)

14. (canceled)

15. The method of claim 11, wherein the different CRISPR system detects a different microbe at each location.

16. The method of claim 10, wherein the substrate is exposed to the sample passively, by temporarily immersing the substrate in a fluid to be sampled, by applying a fluid to be tested to the substrate, or by contacting a surface to be tested with the substrate.

17. The method of claim 16, wherein the sample is a biological or environmental sample.

18. The method of claim 17, wherein the environmental sample is obtained from a food sample, a beverage sample, a paper surface, a fabric surface, a metal surface, a wood surface, a plastic surface, a soil sample, a fresh water sample, a waste water sample, a saline water sample, exposure to atmospheric air or other gas sample, or a combination thereof.

19. The method of claim 17, wherein the biological sample is obtained from a tissue sample, saliva, blood, plasma, sera, stool, urine, sputum, mucous, lymph, synovial fluid, cerebrospinal fluid, ascites, pleural effusion, seroma, pus, or swab of skin or a mucosal membrane surface.

20. The method of claim 17, wherein the environmental sample or biological samples are crude samples and/or wherein the one or more target molecules are not purified or amplified from the sample prior to application of the method.

21. A method for monitoring viral disease outbreaks and/or evolution, comprising:
exposing the CRISPR system of claim 1 to a sample;
activating the RNA effector protein via binding of the one or more guide RNAs to the one or more target sequences comprising non-synonymous viral mutations such that a detectable positive signal is produced; and
detecting the detectable positive signal, wherein detection of the detectable positive signal indicates a type of viral strain that is present in the sample.

22. The method of claim 21, wherein exposing the CRISPR system comprises locating one or more CRISPR systems within one or more individual discrete volumes and adding a sample or sample aliquot to the one or more individual discrete volumes.

23. A method for screening samples for viral antigens and/or viral specific antibodies comprising:
exposing the CRISPR system of claim 2 to a sample, wherein the one or more aptamers bind to one or more viral antigens or one or more viral-specific antibodies, and wherein the aptamers encode a barcode that identifies the one or more viral antigens or one or more viral-specific antibodies that the one or more aptamers bind to, and wherein the guide-RNAs are designed to detect the barcode;
activating the RNA effector protein via binding of the one or more guide RNAs to the one or more microbe-specific target RNAs or one or more trigger RNAs such that a detectable positive signal is produced; and
detecting the detectable positive signal, wherein detection of the detectable positive signal indicates a presence of one or more viral antigens or one/or more viral specific antibodies in the sample.

24. The method of claim 3, wherein the virus is a DNA virus.

25. The method of claim 24, wherein the DNA virus is a is a Myoviridae, Podoviridae, Siphoviridae, Alloherpesviridae, Herpesviridae (including human herpes virus, and Varicella Zozter virus), Malocoherpesviridae, Lipothrixviridae, Rudiviridae, Adenoviridae, Ampullaviridae, Ascoviridae, Asfarviridae (including African swine fever virus), Baculoviridae, Cicaudaviridae, Clavaviridae, Corticoviridae, Fuselloviridae, Globuloviridae, Guttaviridae, Hytrosaviridae, Iridoviridae, Maseilleviridae, Mimiviridae, Nudiviridae, Nimaviridae, Pandoraviridae, Papillomaviridae, Phycodnaviridae, Plasmaviridae, Polydnaviruses, Polyomaviridae (including Simian virus 40, JC virus, BK virus), Poxviridae (including Cowpox and smallpox), Sphaerolipoviridae, Tectiviridae, Turriviridae, Dinodnavirus, Salterprovirus, Rhizidovirus, or combination thereof.

26. The method of claim 3, wherein the one or more viruses is a double-stranded RNA virus, a positive sense RNA virus, a negative sense RNA virus, a retrovirus, or a combination thereof.

27. The method of claim 26, wherein the virus is a Coronaviridae virus, a Picornaviridae virus, a Caliciviridae virus, a Flaviviridae virus, a Togaviridae virus, a Bornaviridae, a Filoviridae, a Paramyxoviridae, a Pneumoviridae, a Rhabdoviridae, an Arenaviridae, a Bunyaviridae, an Orthomyxoviridae, or a Deltavirus; optionally Coronavirus, SARS, Poliovirus, Rhinovirus, Hepatitis A, Norwalk virus, Yellow fever virus, West Nile virus, Hepatitis C virus, Dengue fever virus, Zika virus, Rubella virus, Ross River virus, Sindbis virus, Chikungunva virus, Borna disease virus, Ebola virus, Marburg virus, Measles virus, Mumps virus, Nipah virus, Hendra virus, Newcastle disease virus, Human respiratory syncytial virus, Rabies virus, Lassa virus, Hantavirus, Crimean-Congo hemorrhagic fever virus, Influenza, or Hepatitis D virus.

28. (canceled)

29. A method for detecting one or more microbes in a sample, comprising:
contacting a sample with the nucleic acid detection system according to claim 1; and
applying said contacted sample to a lateral flow immunochromatographic assay.

30. The method according to claim 29, wherein said nucleic acid detection system comprises an RNA-based masking construct comprising a first and a second molecule, and wherein said lateral flow immunochromatographic assay comprises detecting said first and second molecule, preferably at discrete detection sites on a lateral flow strip.

31. The method according to claim 30, wherein said first molecule and said second molecule is detected by binding to an antibody recognizing said first or second molecule and detecting said bound molecule, preferably with sandwich antibodies.

32. The method according to claim 30, wherein said lateral flow strip comprises an upstream first antibody directed against said first molecule, and a downstream second antibody directed against said second molecule, and wherein uncleaved RNA-based masking construct is bound by said first antibody if the target nucleic acid is not present in said sample, and wherein cleaved RNA-based masking construct is bound both by said first antibody and said second antibody if the target nucleic acid is present in said sample.

33. A method of detecting a virus, comprising:
obtaining a sample from a subject, wherein the sample is urine, sera, blood or saliva;
amplifying the sample RNA;
combining the sample with an effector protein, one or more guide RNAs designed to bind to corresponding virus-specific target molecules, and a RNA-based masking construct,
activating the RNA effector protein via binding of the one or more guide RNAs to the one or more virus-specific target RNAs, wherein activating the CRISPR effector protein results in modification of the RNA-based masking construct such that a detectable positive signal is produced; and
detecting the signal, wherein detection of the signal indicates the presence of the virus; and
wherein the method does not include a step of extracting RNA from the sample.

34. The method of claim 33, wherein the amplification step is of a duration selected from the group consisting of: 2 hours, 1 hour, 30 minutes, 20 minutes and 10 minutes; and wherein the detection step is of a duration selected from the group consisting of: 3 hours, 2 hours, 1 hour, 30 minutes, 20 minutes and 10 minutes.

35. (canceled)

36. The method of claim 33, wherein the volume of sample required for detection is 100 μl to 1 μl.

37. The method of claim 33, wherein the virus is Zika virus.

38. The method of claim 33, wherein the sample comprises two or more viruses and wherein the method distinguishes between the two or more viruses.

39. The method of claim 33, wherein the RNA-based masking construct comprises a RNA oligonucleotide to which a detectable ligand and a masking component are attached.

40. The method of claim 33, wherein the method further comprises a nuclease inactivation step and a viral inactivation step prior to amplifying the sample RNA.

41. The method of claim 40, wherein the nuclease inactivation step is carried out at a temperature ranging from 37° C. to 50° C. and is of a duration selected from 5 minutes, 10 minutes, 15 minutes, and 20 minutes.

42. (canceled)

43. The method of claim 40, wherein the viral inactivation step is carried out at a temperature ranging from 64° C. to 95° C. and has a duration of 5 minutes.

44. (canceled)

45. A method for detecting viruses in samples, comprising:
distributing a sample or set of samples into one or more individual discrete volumes, the individual discrete volumes comprising the CRISPR system of claim 2;
incubating the sample or set of samples under conditions sufficient to allow binding of the one or more guide RNAs to one or more target molecules;
activating the CRISPR effector protein via binding of the one or more guide RNAs to the one or more target molecules, wherein activating the CRISPR effector protein results in modification of the RNA-based masking construct such that a detectable positive signal is generated; and
detecting the detectable positive signal, wherein detection of the detectable positive signal indicates a presence of one or more viruses in the sample.

46. A method of detecting viruses, comprising:
exposing the CRISPR system of claim 2 to a sample;
activating the RNA effector protein via binding of the one or more guide RNAs to the one or more microbe-specific target RNAs or one or more trigger RNAs such that a detectable positive signal is produced; and
detecting the detectable positive signal, wherein detection of the detectable positive signal indicates a presence of one or more viruses in the sample.

47. A method for monitoring viral disease outbreaks and/or evolution, comprising:
exposing the CRISPR system of claim 2 to a sample;
activating the RNA effector protein via binding of the one or more guide RNAs to the one or more target sequences comprising non-synonymous viral mutations such that a detectable positive signal is produced; and
detecting the detectable positive signal, wherein detection of the detectable positive signal indicates a type of viral strain that is present in the sample.

48. A method for detecting one or more microbes in a sample, comprising:
contacting a sample with the nucleic acid detection system according to claim 2; and
applying said contacted sample to a lateral flow immunochromatographic assay.

The application's sequence listing, which the Patent Office published only in electronic form, follows.

SEQUENCE LISTING (1008 sequences)

SEQ ID NO: 1 - protein, 1440 aa, Leptotrichia shahii C2c2-2
MGNLFGHKRWYEVRDKKDFKIKRKVKVKRNYDGNKYILNINENNNKEKIDNNKFIRKYINYKKNDNILKEFTRKFHAGNILFKLKGKEGIIRIENNDDFLETEEVVLYIEAYGKSEKLKALGITKKKIIDEAIRQGITKDDKKIEIKRQENEEEIEIDIRDEYTNKTLNDCSIILRIIENDELETKKSIYEIFKNINMSLYKIIEKIIENETEKVFENRYYEEHLREKLLKDDKIDVILTNFMEIREKIKSNLEILGFVKFYLNVGGDKKKSKNKKMLVEKILNINVDLTVEDIADFVIKELEFWNITKRIEKVKKVNNEFLEKRRNRTYIKSYVLLDKHEKFKIERENKKDKIVKFFVENIKNNSIKEKIEKILAEFKIDELIKKLEKELKKGNCDTEIFGIFKKHYKVNFDSKKFSKKSDEEKELYKIIYRYLKGRIEKILVNEQKVRLKKMEKIEIEKILNESILSEKILKRVKQYTLEHIMYLGKLRHNDIDMTTVNTDDFSRLHAKEELDLELITFFASTNMELNKIFSRENINNDENIDFFGGDREKNYVLDKKILNSKIKIIRDLDFIDNKNNITNNFIRKFTKIGTNERNRILHAISKERDLQGTQDDYNKVINIIQNLKISDEEVSKALNLDVVFKDKKNIITKINDIKISEENNNDIKYLPSFSKVLPEILNLYRNNPKNEPFDTIETEKIVLNALIYVNKELYKKLILEDDLEENESKNIFLQELKKTLGNIDEIDENIIENYYKNAQISASKGNNKAIKKYQKKVIECYIGYLRKNYEELFDFSDFKMNIQEIKKQIKDINDNKTYERITVKTSDKTIVINDDFEYIISIFALLNSNAVINKIRNRFFATSVWLNTSEYQNIIDILDEIMQLNTLRNECITENWNLNLEEFIQKMKEIEKDFDDFKIQTKKEIFNNYYEDIKNNILTEFKDDINGCDVLEKKLEKIVIFDDETKFEIDKKSNILQDEQRKLSNINKKDLKKKVDQYIKDKDQEIKSKILCRIIFNSDFLKKYKKEIDNLIEDMESENENKFQEIYYPKERKNELYIYKKNLFLNIGNPNFDKIYGLISNDIKMADAKFLFNIDGKNIRKNKISEIDAILKNLNDKLNGYSKEYKEKYIKKLKENDDFFAKNIQNKNYKSFEKDYNRVSEYKKIRDLVEFNYLNKIESYLIDINWKLAIQMARFERDMHYIVNGLRELGIIKLSGYNTGISRAYPKRNGSDGFYTTTAYYKFFDEESYKKFEKICYGFGIDLSENSEINKPENESIRNYISHFYIVRNPFADYSIAEQIDRVSNLLSYSTRYNNSTYASVFEVFKKDVNLDYDELKKKFKLIGNNDILERLMKPKKVSVLELESYNSDYIKNLIIELLTKIENTNDTLKRPAATKKAGQAKKKKGSYPYDVPDYAYPYDVPDYAYPYDVPDYAEKIIEN

SEQ ID NO: 2 - protein, 1197 aa, Leptotrichia wadei (Lw2)
MKVTKVDGISHKKYIEEGKLVKSTSEENRTSERLSELLSIRLDIYIKNPDNASEEENRIRRENLKKFFSNKVLHLKDSVLYLKNRKEKNAVQDKNYSEEDISEYDLKNKNSFSVLKKILLNEDVNSEELEIFRKDVEAKLNKINSLKYSFEENKANYQKINENNVEKVGGKSKRNIIYDYYRESAKRNDYINNVQEAFDKLYKKEDIEKLFFLIENSKKHEKYKIREYYHKIIGRKNDKENFAKIIYEEIQNVNNIKELIEKIPDMSELKKSQVFYKYYLDKEELNDKNIKYAFCHFVEIEMSQLLKNYVYKRLSNISNDKIKRIFEYQNLKKLIENKLLNKLDTYVRNCGKYNYYLQVGEIATSDFIARNRQNEAFLRNIIGVSSVAYFSLRNILETENENDITGRMRGKTVKNNKGEEKYVSGEVDKIYNENKQNEVKENLKMFYSYDFNMDNKNEIEDFFANIDEAISSIRHGIVHFNLELEGKDIFAFKNIAPSEISKKMFQNEINEKKLKLKIFKQLNSANVFNYYEKDVIIKYLKNTKFNFVNKNIPFVPSFTKLYNKIEDLRNTLKFFWSVPKDKEEKDAQIYLLKNIYYGEFLNKFVKNSKVFFKITNEVIKINKQRNQKTGHYKYQKFENIEKTVPVEYLAIIQSREMINNQDKEEKNTYIDFIQQIFLKGFIDYLNKNNLKYIESNNNNDNNDIFSKIKIKKDNKEKYDKILKNYEKHNRNKEIPHEINEFVREIKLGKILKYTENLNMFYLILKLLNHKELTNLKGSLEKYQSANKEETFSDELELINLLNLDNNRVTEDFELEANEIGKFLDFNENKIKDRKELKKFDTNKIYFDGENIIKHRAFYNIKKYGMLNLLEKIADKAKYKISLKELKEYSNKKNEIEKNYTMQQNLHRKYARPKKDEKFNDEDYKEYEKAIGNIQKYTHLKNKVEFNELNLLQGLLLKILHRLVGYTSIWERDLRFRLKGEFPENHYIEEIFNFDNSKNVKYKSGQIVEKYINFYKELYKDNVEKRSIYSDKKVKKLKQEKKDLYIRNYIAHFNYIPHAEISLLEVLENLRKLLSYDRKLKNAIMKSIVDILKEYGFVATFKIGADKKIEIQTLESEKIVHLKNLKKKKLMTDRNSEELCELVKVMFEYKALEKRPAATKKAGQAKKKKGSYPYDVPDYAYPYDVPDYAYPYDVPDYA

SEQ ID NO: 3 - protein, 1120 aa, Listeria seeligeri
MWISIKTLIHHLGVLFFCDYMYNRREKKIIEVKTMRITKVEVDRKKVLISRDKNGGKLVYENEMQDNTEQIMHHKKSSFYKSVVNKTICRPEQKQMKKLVHGLLQENSQEKIKVSDVTKLNISNFLNHRFKKSLYYFPENSPDKSEEYRIEINLSQLLEDSLKKQQGTFICWESFSKDMELYINWAENYISSKTKLIKKSIRNNRIQSTESRSGQLMDRYMKDILNKNKPFDIQSVSEKYQLEKLTSALKATFKEAKKNDKEINYKLKSTLQNHERQIIEELKENSELNQFNIEIRKHLETYFPIKKTNRKVGDIRNLEIGEIQKIVNHRLKNKIVQRILQEGKLASYEIESTVNSNSLQKIKIEEAFALKFINACLFASNNLRNMVYPVCKKDILMIGEFKNSFKEIKHKKFIRQWSQFFSQEITVDDIELASWGLRGAIAPIRNEIIHLKKHSWKKFFNNPTFKVKKSKIINGKTKDVTSEFLYKETLFKDYFYSELDSVPELIINKMESSKILDYYSSDQLNQVFTIPNFELSLLTSAVPFAPSFKRVYLKGFDYQNQDEAQPDYNLKLNIYNEKAFNSEAFQAQYSLFKMVYYQVFLPQFTTNNDLFKSSVDFILTLNKERKGYAKAFQDIRKMNKDEKPSEYMSYIQSQLMLYQKKQEEKEKINHFEKFINQVFIKGFNSFIEKNRLTYICHPTKNTVPENDNIEIPFHTDMDDSNIAFWLMCKLLDAKQLSELRNEMIKFSCSLQSTEEISTFTKAREVIGLALLNGEKGCNDWKELFDDKEAWKKNMSLYVSEELLQSLPYTQEDGQTPVINRSIDLVKKYGTETILEKLFSSSDDYKVSAKDIAKLHEYDVTEKIAQQESLHKQWIEKPGLARDSAWTKKYQNVINDISNYQWAKTKVELTQVRHLHQLTIDLLSRLAGYMSIADRDFQFSSNYILERENSEYRVTSWILLSENKNKNKYNDYELYNLKNASIKVSSKNDPQLKVDLKQLRLTLEYLELFDNRLKEKRNNISHFNYLNGQLGNSILELFDDARDVLSYDRKLKNAVSKSLKEILSSHGMEVTFKPLYQTNHHLKIDKLQPKKIHHLGEKSTVSSNQVSNEYCQLVRTLLTMK

SEQ ID NO: 4 - protein, 1340 aa, Lachnospiraceae bacterium MA2020
MQISKVNHKHVAVGQKDRERITGFIYNDPVGDEKSLEDVVAKRANDTKVLFNVFNTKDLYDSQESDKSEKDKEIISKGAKFVAKSFNSAITILKKQNKIYSTLTSQQVIKELKDKFGGARIYDDDIEEALTETLKKSFRKENVRNSIKVLIENAAGIRSSLSKDEEELIQEYFVKQLVEEYTKTKLQKNVVKSIKNQNMVIQPDSDSQVLSLSESRREKQSSAVSSDTLVNCKEKDVLKAFLTDYAVLDEDERNSLLWKLRNLVNLYFYGSESIRDYSYTKEKSVWKEHDEQKANKTLFIDEICHITKIGKNGKEQKVLDYEENRSRCRKQNINYYRSALNYAKNNTSGIFENEDSNHFWIHLIENEVERLYNGIENGEEFKFETGYISEKVWKAVINHLSIKYIALGKAVYNYAMKELSSPGDIEPGKIDDSYINGITSFDYEIIKAEESLQRDISMNVVFATNYLACATVDTDKDFLLFSKEDIRSCTKKDGNLCKNIMQFWGGYSTWKNFCEEYLKDDKDALELLYSLKSMLYSMRNSSFHFSTENVDNGSWDTELIGKLFEEDCNRAARIEKEKFYNNNLHMFYSSSLLEKVLERLYSSHHERASQVPSFNRVFVRKNFPSSLSEQRITPKFTDSKDEQIWQSAVYYLCKEIYYNDFLQSKEAYKLFREGVKNLDKNDINNQKAADSFKQAVVYYGKAIGNATLSQVCQAIMTEYNRQNNDGLKKKSAYAEKQNSNKYKHYPLFLKQVLQSAFWEYLDENKEIYGFISAQIHKSNVEIKAEDFIANYSSQQYKKLVDKVKKTPELQKWYTLGRLINPRQANQFLGSIRNYVQFVKDIQRRAKENGNPIRNYYEVLESDSIIKILEMCTKLNGTTSNDIHDYFRDEDEYAEYISQFVNFGDVHSGAALNAFCNSESEGKKNGIYYDGINPIVNRNWVLCKLYGSPDLISKIISRVNENMIHDFHKQEDLIREYQIKGICSNKKEQQDLRTFQVLKNRVELRDIVEYSEIINELYGQLIKWCYLRERDLMYFQLGFHYLCLNNASSKEADYIKINVDDRNISGAILYQIAAMYINGLPVYYKKDDMYVALKSGKKASDELNSNEQTSKKINYFLKYGNNILGDKKDQLYLAGLELFENVAEHENIIIFRNEIDHFHYFYDRDRSMLDLYSEVFDRFFTYDMKLRKNVVNMLYNILLDHNIVSSFVFETGEKKVGRGDSEVIKPSAKIRLRANNGVSSDVFTYKVGSKDELKIATLPAKNEEFLLNVARLIYYPDMEAVSENMVREGVVKVEKSNDKKGKISRGSNTRSSNQSKYNNKSKNRMNYSMGSIFEKMDLKFD

SEQ ID NO: 5 - protein, 1437 aa, Lachnospiraceae bacterium NK4A179
MKISKVREENRGAKLTVNAKTAVVSENRSQEGILYNDPSRYGKSRKNDEDRDRYIESRLKSSGKLYRIFNEDKNKRETDELQWFLSEIVKKINRRNGLVLSDMLSVDDRAFEKAFEKYAELSYTNRRNKVSGSPAFETCGVDAATAERLKGIISETNFINRIKNNIDNKVSEDIIDRIIAKYLKKSLCRERVKRGLKKLLMNAFDLPYSDPDIDVQRDFIDYVLEDFYHVRAKSQVSRSIKNMNMPVQPEGDGKFAITVSKGGTESGNKRSAEKEAFKKFLSDYASLDERVRDDMLRRMRRLVVLYFYGSDDSKLSDVNEKFDVWEDHAARRVDNREFIKLPLENKLANGKTDKDAERIRKNTVKELYRNQNIGCYRQAVKAVEEDNNGRYFDDKMLNMFFIHRIEYGVEKIYANLKQVTEFKARTGYLSEKIWKDLINYISIKYIAMGKAVYNYAMDELNASDKKEIELGKISEEYLSGISSFDYELIKAEEMLQRETAVYVAFAARHLSSQTVELDSENSDFLLLKPKGTMDKNDKNKLASNNILNFLKDKETLRDTILQYFGGHSLWTDFPFDKYLAGGKDDVDFLTDLKDVIYSMRNDSFHYATENHNNGKWNKELISAMFEHETERMTVVMKDKFYSNNLPMFYKNDDLKKLLIDLYKDNVERASQVPSFNKVFVRKNFPALVRDKDNLGIELDLKADADKGENELKFYNALYYMFKEIYYNAFLNDKNVRERFITKATKVADNYDRNKERNLKDRIKSAGSDEKKKLREQLQNYIAENDFGQRIKNIVQVNPDYTLAQICQLIMTEYNQQNNGCMQKKSAARKDINKDSYQHYKMLLLVNLRKAFLEFIKENYAFVLKPYKHDLCDKADFVPDFAKYVKPYAGLISRVAGSSELQKWYIVSRFLSPAQANHMLGFLHSYKQYVWDIYRRASETGTEINHSIAEDKIAGVDITDVDAVIDLSVKLCGTISSEISDYFKDDEVYAEYISSYLDFEYDGGNYKDSLNRFCNSDAVNDQKVALYYDGEHPKLNRNIILSKLYGERRFLEKITDRVSRSDIVEYYKLKKETSQYQTKGIFDSEDEQKNIKKFQEMKNIVEFRDLMDYSEIADELQGQLINWIYLRERDLMNFQLGYHYACLNNDSNKQATYVTLDYQGKKNRKINGAILYQICAMYINGLPLYYVDKDSSEWTVSDGKESTGAKIGEFYRYAKSFENTSDCYASGLEIFENISEHDNITELRNYIEHFRYYSSFDRSFLGIYSEVFDRFFTYDLKYRKNVPTILYNILLQHFVNVRFEFVSGKKMIGIDKKDRKIAKEKECARITIREKNGVYSEQFTYKLKNGTVYVDARDKRYLQSIIRLLFYPEKVNMDEMIEVKEKKKPSDNNTGKGYSKRDRQQDRKEYDKYKEKKKKEGNFLSGMGGNINWDEINAQLKN

SEQ ID NO: 6 - protein, 1385 aa, Clostridium aminophilum DSM10710
MKFSKVDHTRSAVGIQKATDSVHGMLYTDPKKQEVNDLDKRFDQLNVKAKRLYNVFNQSKAEEDDDEKRFGKVVKKLNRELKDLLFHREVSRYNSIGNAKYNYYGIKSNPEEIVSNLGMVESLKGERDPQKVISKLLLYYLRKGLKPGTDGLRMILEASCGLRKLSGDEKELKVFLQTLDEDFEKKTFKKNLIRSIENQNMAVQPSNEGDPIIGITQGRFNSQKNEEKSAIERMMSMYADLNEDHREDVLRKLRRLNVLYFNVDTEKTEEPTLPGEVDTNPVFEVWHDHEKGKENDRQFATFAKILTEDRETRKKEKLAVKEALNDLKSAIRDHNIMAYRCSIKVTEQDKDGLFFEDQRINRFWIHHIESAVERILASINPEKLYKLRIGYLGEKVWKDLLNYLSIKYIAVGKAVFHFAMEDLGKTGQDIELGKLSNSVSGGLTSFDYEQIRADETLQRQLSVEVAFAANNLFRAVVGQTGKKIEQSKSEENEEDFLLWKAEKIAESIKKEGEGNTLKSILQFFGGASSWDLNHFCAAYGNESSALGYETKFADDLRKAIYSLRNETFHFTTLNKGSFDWNAKLIGDMFSHEAATGIAVERTRFYSNNLPMFYRESDLKRIMDHLYNTYHPRASQVPSFNSVFVRKNFRLFLSNTLNTNTSFDTEVYQKWESGVYYLFKEIYYNSFLPSGDAHHLFFEGLRRIRKEADNLPIVGKEAKKRNAVQDFGRRCDELKNLSLSAICQMIMTEYNEQNNGNRKVKSTREDKRKPDIFQHYKMLLLRTLQEAFAIYIRREEFKFIFDLPKTLYVMKPVEEFLPNWKSGMFDSLVERVKQSPDLQRWYVLCKFLNGRLLNQLSGVIRSYIQFAGDIQRRAKANHNRLYMDNTQRVEYYSNVLEVVDFCIKGTSRFSNVFSDYFRDEDAYADYLDNYLQFKDEKIAEVSSFAALKTFCNEEEVKAGIYMDGENPVMQRNIVMAKLFGPDEVLKNVVPKVTREEIEEYYQLEKQIAPYRQNGYCKSEEDQKKLLRFQRIKNRVEFQTITEFSEIINELLGQLISWSFLRERDLLYFQLGFHYLCLHNDTEKPAEYKEISREDGTVIRNAILHQVAAMYVGGLPVYTLADKKLAAFEKGEADCKLSISKDTAGAGKKIKDFFRYSKYVLIKDRMLTDQNQKYTIYLAGLELFENTDEHDNITDVRKYVDHFKYYATSDENAMSILDLYSEIHDRFFTYDMKYQKNVANMLENILLRHFVLIRPEFFTGSKKVGEGKKITCKARAQIEIAENGMRSEDFTYKLSDGKKNISTCMIAARDQKYLNTVARLLYYPHEAKKSIVDTREKKNNKKTNRGDGTFNKQKGTARKEKDNGPREFNDTGFSNTPFAGFDPFRNS

SEQ ID NO: 7 - protein, 1175 aa, Carnobacterium gallinarum DSM4847
MRITKVKIKLDNKLYQVTMQKEEKYGTLKLNEESRKSTAEILRLKKASFNKSFHSKTINSQKENKNATIKKNGDYISQIFEKLVGVDTNKNIRKPKMSLTDLKDLPKKDLALFIKRKFKNDDIVEIKNLDLISLFYNALQKVPGEHFTDESWADFCQEMMPYREYKNKFIERKIILLANSIEQNKGFSINPETFSKRKRVLHQWAIEVQERGDFSILDEKLSKLAEIYNFKKMCKRVQDELNDLEKSMKKGKNPEKEKEAYKKQKNFKIKTIWKDYPYKTHIGLIEKIKENEELNQFNIEIGKYFEHYFPIKKERCTEDEPYYLNSETIATTVNYQLKNALISYLMQIGKYKQFGLENQVLDSKKLQEIGIYEGFQTKFMDACVFATSSLKNIIEPMRSGDILGKREFKEAIATSSFVNYHHFFPYFPFELKGMKDRESELIPFGEQTEAKQMQNIWALRGSVQQIRNEIFHSFDKNQKFNLPQLDKSNFEFDASENSTGKSQSYIETDYKFLFEAEKNQLEQFFIERIKSSGALEYYPLKSLEKLFAKKEMKFSLGSQVVAFAPSYKKLVKKGHSYQTATEGTANYLGLSYYNRYELKEESFQAQYYLLKLIYQYVFLPNFSQGNSPAFRETVKAILRINKDEARKKMKKNKKFLRKYAFEQVREMEFKETPDQYMSYLQSEMREEKVRKAEKNDKGFEKNITMNFEKLLMQIFVKGFDVFLTTFAGKELLLSSEEKVIKETEISLSKKINEREKTLKASIQVEHQLVATNSAISYWLFCKLLDSRHLNELRNEMIKFKQSRIKFNHTQHAELIQNLLPIVELTILSNDYDEKNDSQNVDVSAYFEDKSLYETAPYVQTDDRTRVSFRPILKLEKYHTKSLIEALLKDNPQFRVAATDIQEWMHKREEIGELVEKRKNLHTEWAEGQQTLGAEKREEYRDYCKKIDRFNWKANKVTLTYLSQLHYLITDLLGRMVGFSALFERDLVYFSRSFSELGGETYHISDYKNLSGVLRLNAEVKPIKIKNIKVIDNEENPYKGNEPEVKPFLDRLHAYLENVIGIKAVHGKIRNQTAHLSVLQLELSMIESMNNLRDLMAYDRKLKNAVTKSMIKILDKHGMILKLKIDENHKNFEIESLIPKEIIHLKDKAIKTNQVSEEYCQLVLALLTTNPGNQLN

SEQ ID NO: 8 - protein, 1164 aa, Carnobacterium gallinarum DSM4847
MRMTKVKINGSPVSMNRSKLNGHLVWNGTTNTVNILTKKEQSFAASFLNKTLVKADQVKGYKVLAENIFIIFEQLEKSNSEKPSVYLNNIRRLKEAGLKRFFKSKYHEEIKYTSEKNQSVPTKLNLIPLFFNAVDRIQEDKFDEKNWSYFCKEMSPYLDYKKSYLNRKKEILANSIQQNRGFSMPTAEEPNLLSKRKQLFQQWAMKFQESPLIQQNNFAVEQFNKEFANKINELAAVYNVDELCTAITEKLMNFDKDKSNKTRNFEIKKLWKQHPHNKDKALIKLFNQEGNEALNQFNIELGKYFEHYFPKTGKKESAESYYLNPQTIIKTVGYQLRNAFVQYLLQVGKLHQYNKGVLDSQTLQEIGMYEGFQTKFMDACVFASSSLRNIIQATTNEDILTREKFKKELEKNVELKHDLFFKTEIVEERDENPAKKIAMTPNELDLWAIRGAVQRVRNQIFHQQINKRHEPNQLKVGSFENGDLGNVSYQKTIYQKLFDAEIKDIEIYFAEKIKSSGALEQYSMKDLEKLFSNKELTLSLGGQVVAFAPSYKKLYKQGYFYQNEKTIELEQFTDYDFSNDVFKANYYLIKLIYHYVFLPQFSQANNKLFKDTVHYVIQQNKELNTTEKDKKNNKKIRKYAFEQVKLMKNESPEKYMQYLQREMQEERTIKEAKKTNEEKPNYNFEKLLIQIFIKGFDTFLRNFDLNLNPAEELVGTVKEKAEGLRKRKERIAKILNVDEQIKTGDEEIAFWIFAKLLDARHLSELRNEMIKFKQSSVKKGLIKNGDLIEQMQPILELCILSNDSESMEKESFDKIEVFLEKVELAKNEPYMQEDKLTPVKFRFMKQLEKYQTRNFIENLVIENPEFKVSEKIVLNWHEEKEKIADLVDKRTKLHEEWASKAREIEEYNEKIKKNKSKKLDKPAEFAKFAEYKIICEAIENFNRLDHKVRLTYLKNLHYLMIDLMGRMVGFSVLFERDFVYMGRSYSALKKQSIYLNDYDTFANIRDWEVNENKHLFGTSSSDLTFQETAEFKNLKKPMENQLKALLGVTNHSFEIRNNIAHLHVLRNDGKGEGVSLLSCMNDLRKLMSYDRKLKNAVTKAIIKILDKHGMILKLTNNDHTKPFEIESLKPKKIIHLEKSNHSFPMDQVSQEYCDLVKKMLVFTN

SEQ ID NO: 9 - protein, 1154 aa, Paludibacter propionicigenes WB4
MRVSKVKVKDGGKDKMVLVHRKTTGAQLVYSGQPVSNETSNILPEKKRQSFDLSTLNKTIIKFDTAKKQKLNVDQYKIVEKIFKYPKQELPKQIKAEEILPFLNHKFQEPVKYWKNGKEESFNLTLLIVEAVQAQDKRKLQPYYDWKTWYIQTKSDLLKKSIENNRIDLTENLSKRKKALLAWETEFTASGSIDLTHYHKVYMTDVLCKMLQDVKPLTDDKGKINTNAYHRGLKKALQNHQPAIFGTREVPNEANRADNQLSIYHLEVVKYLEHYFPIKTSKRRNTADDIAHYLKAQTLKTTIEKQLVNAIRANIIQQGKTNHHELKADTTSNDLIRIKTNEAFVLNLTGTCAFAANNIRNMVDNEQTNDILGKGDFIKSLLKDNTNSQLYSFFFGEGLSTNKAEKETQLWGIRGAVQQIRNNVNHYKKDALKTVFNISNFENPTITDPKQQTNYADTIYKARFINELEKIPEAFAQQLKTGGAVSYYTIENLKSLLTTFQFSLCRSTIPFAPGFKKVFNGGINYQNAKQDESFYELMLEQYLRKENFAEESYNARYFMLKLIYNNLFLPGFTTDRKAFADSVGFVQMQNKKQAEKVNPRKKEAYAFEAVRPMTAADSIADYMAYVQSELMQEQNKKEEKVAEETRINFEKFVLQVFIKGFDSFLRAKEFDFVQMPQPQLTATASNQQKADKLNQLEASITADCKLTPQYAKADDATHIAFYVFCKLLDAAHLSNLRNELIKFRESVNEFKFHHLLEIIEICLLSADVVPTDYRDLYSSEADCLARLRPFIEQGADITNWSDLFVQSDKHSPVIHANIELSVKYGTTKLLEQIINKDTQFKTTEANFTAWNTAQKSIEQLIKQREDHHEQWVKAKNADDKEKQERKREKSNFAQKFIEKHGDDYLDICDYINTYNWLDNKMHFVHLNRLHGLTIELLGRMAGFVALFDRDFQFFDEQQIADEFKLHGFVNLHSIDKKLNEVPTKKIKEIYDIRNKIIQINGNKINESVRANLIQFISSKRNYYNNAFLHVSNDEIKEKQMYDIRNHIAHFNYLTKDAADFSLIDLINELRELLHYDRKLKNAVSKAFIDLFDKHGMILKLKLNADHKLKVESLEPKKIYHLGSSAKDKPEYQYCTNQVMMAYCNMCRSLLEMKK

SEQ ID NO: 10 - protein, 970 aa, Listeria weihenstephanensis FSLR9-0317
MLALLHQEVPSQKLHNLKSLNTESLTKLFKPKFQNMISYPPSKGAEHVQFCLTDIAVPAIRDLDEIKPDWGIFFEKLKPYTDWAESYIHYKQTTIQKSIEQNKIQSPDSPRKLVLQKYVTAFLNGEPLGLDLVAKKYKLADLAESFKVVDLNEDKSANYKIKACLQQHQRNILDELKEDPELNQYGIEVKKYIQRYFPIKRAPNRSKHARADFLKKELIESTVEQQFKNAVYHYVLEQGKMEAYELTDPKTKDLQDIRSGEAFSFKFINACAFASNNLKMILNPECEKDILGKGDFKKNLPNSTTQSDVVKKMIPFFSDEIQNVNFDEAIWAIRGSIQQIRNEVYHCKKHSWKSILKIKGFEFEPNNMKYTDSDMQKLMDKDIAKIPDFIEEKLKSSGIIRFYSHDKLQSIWEMKQGFSLLTTNAPFVPSFKRVYAKGHDYQTSKNRYYDLGLTTFDILEYGEEDFRARYFLTKLVYYQQFMPWFTADNNAFRDAANFVLRLNKNRQQDAKAFINIREVEEGEMPRDYMGYVQGQIAIHEDSTEDTPNHFEKFISQVFIKGFDSHMRSADLKFIKNPRNQGLEQSEIEEMSFDIKVEPSFLKNKDDYIAFWTFCKMLDARHLSELRNEMIKYDGHLTGEQEIIGLALLGVDSRENDWKQFFSSEREYEKIMKGYVGEELYQREPYRQSDGKTPILFRGVEQARKYGTETVIQRLFDASPEFKVSKCNITEWERQKETIEETIERRKELHNEWEKNPKKPQNNAFFKEYKECCDAIDAYNWHKNKTTLVYVNELHHLLIEILGRYVGYVAIADRDFQCMANQYFKHSGITERVEYWGDNRLKSIKKLDTFLKKEGLFVSEKNARNHIAHLNYLSLKSECTLLYLSERLREIFKYDRKLKNAVSKSLIDILDRHGMSVVFANLKENKHRLVIKSLEPKKLRHLGEKKIDNGYIETNQVSEEYCGIVKRLLEI

SEQ ID NO: 11 - protein, 1051 aa, Listeriaceae bacterium FSLM6-0635 (Listeria newyorkensis)
MKITKMRVDGRTIVMERTSKEGQLGYEGIDGNKTTEIIFDKKKESFYKSILNKTVRKPDEKEKNRRKQAINKAINKEITELMLAVLHQEVPSQKLHNLKSLNTESLTKLFKPKFQNMISYPPSKGAEHVQFCLTDIAVPAIRDLDEIKPDWGIFFEKLKPYTDWAESYIHYKQTTIQKSIEQNKIQSPDSPRKLVLQKYVTAFLNGEPLGLDLVAKKYKLADLAESFKLVDLNEDKSANYKIKACLQQHQRNILDELKEDPELNQYGIEVKKYIQRYFPIKRAPNRSKHARADFLKKELIESTVEQQFKNAVYHYVLEQGKMEAYELTDPKTKDLQDIRSGEAFSFKFINACAFASNNLKMILNPECEKDILGKGNFKKNLPNSTTRSDVVKKMIPFFSDELQNVNFDEAIWAIRGSIQQIRNEVYHCKKHSWKSILKIKGFEFEPNNMKYADSDMQKLMDKDIAKIPEFIEEKLKSSGVVRFYRHDELQSIWEMKQGFSLLTTNAPFVPSFKRVYAKGHDYQTSKNRYYNLDLTTFDILEYGEEDFRARYFLTKLVYYQQFMPWFTADNNAFRDAANFVLRLNKNRQQDAKAFINIREVEEGEMPRDYMGYVQGQIAIHEDSIEDTPNHFEKFISQVFIKGFDRHMRSANLKFIKNPRNQGLEQSEIEEMSFDIKVEPSFLKNKDDYIAFWIFCKMLDARHLSELRNEMIKYDGHLTGEQEIIGLALLGVDSRENDWKQFFSSEREYEKIMKGYVVEELYQREPYRQSDGKTPILFRGVEQARKYGTETVIQRLFDANPEFKVSKCNLAEWERQKETIEETIKRRKELHNEWAKNPKKPQNNAFFKEYKECCDAIDAYNWHKNKTTLAYVNELHHLLIEILGRYVGYVAIADRDFQCMANQYFKHSGITERVEYWGDNRLKSIKKLDTFLKKEGLFVSEKNARNHIAHLNYLSLKSECTLLYLSERLREIFKYDRKLKNAVSKSLIDILDRHGMSVVFANLKENKHRLVIKSLEPKKLRHLGGKKIDGGYIETNQVSEEYCGIVKRLLEM

SEQ ID NO: 12 - protein, 1152 aa, Leptotrichia wadei F0279
MKVTKVDGISHKKYIEEGKLVKSTSEENRTSERLSELLSIRLDIYIKNPDNASEEENRIRRENLKKFFSNKVLHLKDSVLYLKNRKEKNAVQDKNYSEEDISEYDLKNKNSFSVLKKILLNEDVNSEELEIFRKDVEAKLNKINSLKYSFEENKANYQKINENNVEKVGGKSKRNIIYDYYRESAKRNDYINNVQEAFDKLYKKEDIEKLFFLIENSKKHEKYKIREYYHKIIGRKNDKENFAKIIYEEIQNVNNIKELIEKIPDMSELKKSQVFYKYYLDKEELNDKNIKYAFCHFVEIEMSQLLKNYVYKRLSNISNDKIKRIFEYQNLKKLIENKLLNKLDTYVRNCGKYNYYLQVGEIATSDFIARNRQNEAFLRNIIGVSSVAYFSLRNILETENENDITGRMRGKTVKNNKGEEKYVSGEVDKIYNENKQNEVKENLKMFYSYDFNMDNKNEIEDFFANIDEAISSIRHGIVHFNLELEGKDIFAFKNIAPSEISKKMFQNEINEKKLKLKIFKQLNSANVFNYYEKDVIIKYLKNTKFNFVNKNIPFVPSFTKLYNKIEDLRNTLKFFWSVPKDKEEKDAQIYLLKNIYYGEFLNKFVKNSKVFFKITNEVIKINKQRNQKTGHYKYQKFENIEKTVPVEYLAIIQSREMINNQDKEEKNTYIDFIQQIFLKGFIDYLNKNNLKYIESNNNNDNNDIFSKIKIKKDNKEKYDKILKNYEKHNRNKEIPHEINEFVREIKLGKILKYTENLNMFYLILKLLNHKELTNLKGSLEKYQSANKEETFSDELELINLLNLDNNRVTEDFELEANEIGKFLDFNENKIKDRKELKKFDTNKIYFDGENIIKHRAFYNIKKYGMLNLLEKIADKAKYKISLKELKEYSNKKNEIEKNYTMQQNLHRKYARPKKDEKFNDEDYKEYEKAIGNIQKYTHLKNKVEFNELNLLQGLLLKILHRLVGYTSIWERDLRFRLKGEFPENHYIEEIFNFDNSKNVKYKSGQIVEKYINFYKELYKDNVEKRSIYSDKKVKKLKQEKKDLYIRNYIAHFNYIPHAEISLLEVLENLRKLLSYDRKLKNAIMKSIVDILKEYGFVATFKIGADKKIEIQTLESEKIVHLKNLKKKKLMTDRNSEELCELVKVMFEYKALE

SEQ ID NO: 13 - protein, 1285 aa, Rhodobacter capsulatus SB1003
MQIGKVQGRTISEFGDPAGGLKRKISTDGKNRKELPAHLSSDPKALIGQWISGIDKIYRKPDSRKSDGKAIHSPTPSKMQFDARDDLGEAFWKLVSEAGLAQDSDYDQFKRRLHPYGDKFQPADSGAKLKFEADPPEPQAFHGRWYGAMSKRGNDAKELAAALYEHLHVDEKRIDGQPKRNPKTDKFAPGLVVARALGIESSVLPRGMARLARNWGEEEIQTYFVVDVAASVKEVAKAAVSAAQAFDPPRQVSGRSLSPKVGFALAEHLERVTGSKRCSFDPAAGPSVLALHDEVKKTYKRLCARGKNAARAFPADKTELLALMRHTHENRVRNQMVRMGRVSEYRGQQAGDLAQSHYWTSAGQTEIKESEIFVRLWVGAFALAGRSMKAWIDPMGKIVNTEKNDRDLTAAVNIRQVISNKEMVAEAMARRGIYFGETPELDRLGAEGNEGFVFALLRYLRGCRNQTFHLGARAGFLKEIRKELEKTRWGKAKEAEHVVLTDKTVAAIRAIIDNDAKALGARLLADLSGAFVAHYASKEHFSTLYSEIVKAVKDAPEVSSGLPRLKLLLKRADGVRGYVHGLRDTRKHAFATKLPPPPAPRELDDPATKARYIALLRLYDGPFRAYASGITGTALAGPAARAKEAATALAQSVNVTKAYSDVMEGRTSRLRPPNDGETLREYLSALTGETATEFRVQIGYESDSENARKQAEFIENYRRDMLAFMFEDYIRAKGFDWILKIEPGATAMTRAPVLPEPIDTRGQYEHWQAALYLVMHFVPASDVSNLLHQLRKWEALQGKYELVQDGDATDQADARREALDLVKRFRDVLVLFLKTGEARFEGRAAPFDLKPFRALFANPATFDRLFMATPTTARPAEDDPEGDGASEPELRVARTLRGLRQIARYNHMAVLSDLFAKHKVRDEEVARLAEIEDETQEKSQIVAAQELRTDLHDKVMKCHPKTISPEERQSYAAAIKTIEEHRFLVGRVYLGDHLRLHRLMMDVIGRLIDYAGAYERDTGTFLINASKQLGAGADWAVTIAGAANTDARTQTRKDLAHFNVLDRADGTPDLTALVNRAREMMAYDRKRKNAVPRSILDMLARLGLTLKWQMKDHLLQDATITQAAIKHLDKVRLTVGGPAAVTEARFSQDYLQMVAAVFNGSVQNPKPRRRDDGDAWHKPPKPATAQSQPDQKPPNKAPSAGSRLPPPQVGEVYEGVVVKVIDTGSLGFLAVEGVAGNIGLHISRLRRIREDAIIVGRRYRFRVEIYVPPKSNTSKLNAADLVRID

SEQ ID NO: 14 - protein, 1285 aa, Rhodobacter capsulatus R121
MQIGKVQGRTISEFGDPAGGLKRKISTDGKNRKELPAHLSSDPKALIGQWISGIDKIYRKPDSRKSDGKAIHSPTPSKMQFDARDDLGEAFWKLVSEAGLAQDSDYDQFKRRLHPYGDKFQPADSGAKLKFEADPPEPQAFHGRWYGAMSKRGNDAKELAAALYEHLHVDEKRIDGQPKRNPKTDKFAPGLVVARALGIESSVLPRGMARLARNWGEEEIQTYFVVDVAASVKEVAKAAVSAAQAFDPPRQVSGRSLSPKVGFALAEHLERVTGSKRCSFDPAAGPSVLALHDEVKKTYKRLCARGKNAARAFPADKTELLALMRHTHENRVRNQMVRMGRVSEYRGQQAGDLAQSHYWTSAGQTEIKESEIFVRLWVGAFALAGRSMKAWIDPMGKIVNTEKNDRDLTAAVNIRQVISNKEMVAEAMARRGIYFGETPELDRLGAEGNEGFVFALLRYLRGCRNQTFHLGARAGFLKEIRKELEKTRWGKAKEAEHVVLTDKTVAAIRAIIDNDAKALGARLLADLSGAFVAHYASKEHFSTLYSEIVKAVKDAPEVSSGLPRLKLLLKRADGVRGYVHGLRDTRKHAFATKLPPPPAPRELDDPATKARYIALLRLYDGPFRAYASGITGTALAGPAARAKEAATALAQSVNVTKAYSDVMEGRSSRLRPPNDGETLREYLSALTGETATEFRVQIGYESDSENARKQAEFIENYRRDMLAFMFEDYIRAKGFDWILKIEPGATAMTRAPVLPEPIDTRGQYEHWQAALYLVMHFVPASDVSNLLHQLRKWEALQGKYELVQDGDATDQADARREALDLVKRFRDVLVLFLKTGEARFEGRAAPFDLKPFRALFANPATFDRLFMATPTTARPAEDDPEGDGASEPELRVARTLRGLRQIARYNHMAVLSDLFAKHKVRDEEVARLAEIEDETQEKSQIVAAQELRTDLHDKVMKCHPKTISPEERQSYAAAIKTIEEHRFLVGRVYLGDHLRLHRLMMDVIGRLIDYAGAYERDTGTFLINASKQLGAGADWAVTIAGAANTDARTQTRKDLAHFNVLDRADGTPDLTALVNRAREMMAYDRKRKNAVPRSILDMLARLGLTLKWQMKDHLLQDATITQAAIKHLDKVRLTVGGPAAVTEARFSQDYLQMVAAVFNGSVQNPKPRRRDDGDAWHKPPKPATAQSQPDQKPPNKAPSAGSRLPPPQVGEVYEGVVVKVIDTGSLGFLAVEGVAGNIGLHISRLRRIREDAIIVGRRYRFRVEIYVPPKSNTSKLNAADLVRID

SEQ ID NO: 15 - protein, 1285 aa, Rhodobacter capsulatus DE442; identical to SEQ ID NO: 14

SEQ ID NO: 16 - DNA, 47 bp, Artificial Sequence
  Synthetic
aattctaatacgactcactatagggggatcctctagaaatatggatt

SEQ ID NO: 17 - DNA, 22 bp, Artificial Sequence
  Synthetic
ctcgtatgttgtgtggaattgt

SEQ ID NO: 18 - DNA, 59 bp, Artificial Sequence
  Synthetic
aattctaatacgactcactatagggatcctctagaaatatggattacttggtagaacag

SEQ ID NO: 19 - DNA, 35 bp, Artificial Sequence
  Synthetic
gataaacacaggaaacagctatgaccatgattacg

SEQ ID NO: 20 - DNA, 54 bp, Artificial Sequence
  Synthetic
aattctaatacgactcactataggccgctgctaatgataggttgctactcacaa

SEQ ID NO: 21 - DNA, 34 bp, Artificial Sequence
  Synthetic
tcaatgtcagtcaccactattccatccacaacag

SEQ ID NO: 22 - DNA, 45 bp, Artificial Sequence
  Synthetic
gaaattaatacgactcactatagggcgtggcgcactacatgtact

SEQ ID NO: 23 - DNA, 30 bp, Artificial Sequence
  Synthetic
tgtcaatgtcagtcaccactattccatcca

SEQ ID NO: 24 - DNA, 49 bp, Artificial Sequence
  Synthetic
aattctaatacgactcactatagggtccagactcctacgggaggcwgca

SEQ ID NO: 25 - DNA, 52 bp, Artificial Sequence
  Synthetic
tttcgctctattctcatcagtttcatgtcctgtgtcattaccgcggctgctg

SEQ ID NO: 26 - DNA, 31 bp, Artificial Sequence
  Synthetic
ggtacacttcaggtatatttgaggttcattc

SEQ ID NO: 27 - DNA, 56 bp, Artificial Sequence
  Synthetic
gaaattaatacgactcactataggggttgatatgtcagagctttccagagaaataa

SEQ ID NO: 28 - DNA, 31 bp, Artificial Sequence
  Synthetic
acactaatattgattccttcagatatggact

SEQ ID NO: 29 - DNA, 55 bp, Artificial Sequence
  Synthetic
gaaattaatacgactcactatagggatcgttattcttacgcgttgtcattgaaag

SEQ ID NO: 30 - DNA, 30 bp, Artificial Sequence
  Synthetic
gaatctcttgaacccagtaggcagaggttg

SEQ ID NO: 31 - DNA, 57 bp, Artificial Sequence
  Synthetic
gaaattaatacgactcactatagggaaaggcctaagtgtccttctaccattattttg

SEQ ID NO: 32 - DNA, 32 bp, Artificial Sequence
  Synthetic
tttgtttttgatgttgttgttgtttttgtgtc

SEQ ID NO: 33 - DNA, 57 bp, Artificial Sequence
  Synthetic
gaaattaatacgactcactatagggaatgcattcatagccaaattctactggaaata

SEQ ID NO: 34 - DNA, 32 bp, Artificial Sequence
  Synthetic
gagtacgtccgcttcaccggctacccctgctc

SEQ ID NO: 35 - DNA, 57 bp, Artificial Sequence
  Synthetic
gaaattaatacgactcactatagggatagtcccctcggcgaacatggacccctacaa

SEQ ID NO: 36 - DNA, 57 bp, Artificial Sequence
  Synthetic
gaaattaatacgactcactatagggtcatgaagacctcacagtaaaaataggtgatt

SEQ ID NO: 37 - DNA, 32 bp, Artificial Sequence
  Synthetic
attcttaccatccacaaaatggatccagacaa

SEQ ID NO: 38 - DNA, 53 bp, Artificial Sequence
  Synthetic
gaaattaatacgactcactataggggcagcatgtcaagatcacagattttggg

SEQ ID NO: 39 - DNA, 29 bp, Artificial Sequence
  Synthetic
cctccttctgcatggtattctttctcttc

SEQ ID NO: 40 - DNA, 47 bp, Artificial Sequence; identical to SEQ ID NO: 16
  Synthetic

SEQ ID NO: 41 - DNA, 22 bp, Artificial Sequence
  Synthetic
ctcgtatgttgtgtggaattgt

SEQ ID NO: 42 - DNA, 49 bp, Artificial Sequence
  Synthetic
aattctaatacgactcactatagggggatcctctagaaatatggattac

SEQ ID NO: 43 - DNA, 22 bp, Artificial Sequence
  Synthetic
aaacacaggaaacagctatgac

SEQ ID NO: 44 - DNA, 49 bp, Artificial Sequence
  Synthetic
aattctaatacgactcactataggcctctagaaatatggattacttggt

SEQ ID NO: 45 - DNA, 22 bp, Artificial Sequence
  Synthetic
cgtatgttgtgtggaattgtga

SEQ ID NO: 46 - DNA, 60 bp, Artificial Sequence
  Synthetic
gaaattaatacgactcactatagggctgtcttgtctctcatggccgctggctggcttttc

SEQ ID NO: 47 - DNA, 33 bp, Artificial Sequence
  Synthetic
cgtacacaccgatggagccgccaaagtcctgtt

SEQ ID NO: 48 - DNA, 60 bp, Artificial Sequence
  Synthetic
gaaattaatacgactcactatagggagcaaatggaaactggcgaccaacggtttggcgat

SEQ ID NO: 49 - DNA, 32 bp, Artificial Sequence
  Synthetic
actgccccgaaacccggcatgtcgagatagga

SEQ ID NO: 50 - RNA, 67 nt, Artificial Sequence
  Synthetic
ggggauuuagacuaccccaaaaacgaaggggacuaaaacuagauugcuguucuaccaaguaauccau

SEQ ID NO: 51 - RNA, 28 nt, Artificial Sequence
  Synthetic
uagauugcuguucuaccaaguaauccau

SEQ ID NO: 52 - RNA, 67 nt, Artificial Sequence
  Synthetic
ggggauuuagacuaccccaaaaacgaaggggacuaaaaccauguagugcgccacgagcaaaaugaug

SEQ ID NO: 53 - RNA, 28 nt, Artificial Sequence
  Synthetic
cauguagugcgccacgagcaaaaugaug

SEQ ID NO: 54 - RNA, 67 nt, Artificial Sequence
  Synthetic
ggggauuuagacuaccccaaaaacgaaggggacuaaaacugcugccugcagcccugggaucaaguac

SEQ ID NO: 55 - RNA, 28 nt, Artificial Sequence
  Synthetic
ugcugccugcagcccugggaucaaguac

SEQ ID NO: 56 - RNA, 67 nt, Artificial Sequence
  Synthetic
ggggauuuagacuaccccaaaaacgaaggggacuaaaacacuuuacucccuuccuccccgcugaaag

SEQ ID NO: 57 - RNA, 28 nt, Artificial Sequence
  Synthetic
acuuuacucccuuccuccccgcugaaag

SEQ ID NO: 58 - RNA, 67 nt, Artificial Sequence
  Synthetic
ggggauuuagacuaccccaaaaacgaaggggacuaaaacaccucaucgccuuccuccccgcugaaag

SEQ ID NO: 59 - RNA, 28 nt, Artificial Sequence
  Synthetic
accucaucgccuuccuccccgcugaaag

SEQ ID NO: 60 - RNA, 67 nt, Artificial Sequence
  Synthetic
ggggauuuagacuaccccaaaaacgaaggggacuaaaacacuuacugcccuuccucccaacuuaaag

SEQ ID NO: 61 - RNA, 28 nt, Artificial Sequence
  Synthetic
acuuacugcccuuccucccaacuuaaag

SEQ ID NO: 62 - RNA, 67 nt, Artificial Sequence
  Synthetic
ggggauuuagacuaccccaaaaacgaaggggacuaaaacgaacccggaccuucgucgauggugaaag

SEQ ID NO: 63 - RNA, 28 nt, Artificial Sequence
  Synthetic
gaacccggaccuucgucgauggugaaag

SEQ ID NO: 64 - RNA, 67 nt, Artificial Sequence
  Synthetic
ggggauuuagacuaccccaaaaacgaaggggacuaaaacuuacacauauguucuucccuaauaacag

SEQ ID NO: 65 - RNA, 28 nt, Artificial Sequence
  Synthetic
uuacacauauguucuucccuaauaacag

SEQ ID NO: 66 - RNA, 67 nt, Artificial Sequence
  Synthetic
ggggauuuagacuaccccaaaaacgaaggggacuaaaacaugguuccgcgacgagguuggucagcgc

SEQ ID NO: 67 - RNA, 28 nt, Artificial Sequence
  Synthetic
augguuccgcgacgagguuggucagcgc

SEQ ID NO: 68 - RNA, 67 nt, Artificial Sequence
  Synthetic
ggggauuuagacuaccccaaaaacgaaggggacuaaaaccugccagacauucggugcgagcuggcgg

SEQ ID NO: 69 - RNA, 28 nt, Artificial Sequence
  Synthetic
cugccagacauucggugcgagcuggcgg

SEQ ID NO: 70 - RNA, 67 nt, Artificial Sequence
  Synthetic
ggggauuuagacuaccccaaaaacgaaggggacuaaaacaagauugcuguucuaccaaguaauccau

SEQ ID NO: 71 - RNA, 28 nt, Artificial Sequence
  Synthetic
aagauugcuguucuaccaaguaauccau

SEQ ID NO: 72 - RNA, 67 nt, Artificial Sequence
  Synthetic
ggggauuuagacuaccccaaaaacgaaggggacuaaaacuugauugcuguucuaccaaguaauccau

SEQ ID NO: 73 - RNA, 28 nt, Artificial Sequence
  Synthetic
uugauugcuguucuaccaaguaauccau

SEQ ID NO: 74 - RNA, 67 nt, Artificial Sequence
  Synthetic
ggggauuuagacuaccccaaaaacgaaggggacuaaaacuacauugcuguucuaccaaguaauccau

SEQ ID NO: 75 - RNA, 28 nt, Artificial Sequence
  Synthetic
uacauugcuguucuaccaaguaauccau

SEQ ID NO: 76 - RNA, 67 nt, Artificial Sequence
  Synthetic
ggggauuuagacuaccccaaaaacgaaggggacuaaaacuaguuugcuguucuaccaaguaauccau

SEQ ID NO: 77 - RNA, 28 nt, Artificial Sequence
  Synthetic
uaguuugcuguucuaccaaguaauccau

SEQ ID NO: 78 - RNA, 67 nt, Artificial Sequence
  Synthetic
ggggauuuagacuaccccaaaaacgaaggggacuaaaacuagaaugcuguucuaccaaguaauccau

SEQ ID NO: 79 - RNA, 28 nt, Artificial Sequence
  Synthetic
uagaaugcuguucuaccaaguaauccau

SEQ ID NO: 80 - RNA, 67 nt, Artificial Sequence
  Synthetic
ggggauuuagacuaccccaaaaacgaaggggacuaaaacuagauagcuguucuaccaaguaauccau

SEQ ID NO: 81 - RNA, 28 nt, Artificial Sequence
  Synthetic
uagauagcuguucuaccaaguaauccau

SEQ ID NO: 82 - RNA, 67 nt, Artificial Sequence
  Synthetic
ggggauuuagacuaccccaaaaacgaaggggacuaaaacuagauuccuguucuaccaaguaauccau

SEQ ID NO: 83 - RNA, 28 nt, Artificial Sequence
  Synthetic
uagauuccuguucuaccaaguaauccau

SEQ ID NO: 84 - RNA, 67 nt, Artificial Sequence
  Synthetic
ggggauuuagacuaccccaaaaacgaaggggacuaaaacuagauugguguucuaccaaguaauccau

SEQ ID NO: 85 - RNA, 28 nt, Artificial Sequence
  Synthetic
uagauugguguucuaccaaguaauccau

SEQ ID NO: 86 - RNA, 67 nt, Artificial Sequence
  Synthetic
ggggauuuagacuaccccaaaaacgaaggggacuaaaacuagauugcaguucuaccaaguaauccau

SEQ ID NO: 87 - RNA, 28 nt, Artificial Sequence
  Synthetic
uagauugcaguucuaccaaguaauccau

SEQ ID NO: 88 - RNA, 67 nt, Artificial Sequence
  Synthetic
ggggauuuagacuaccccaaaaacgaaggggacuaaaacuagauugcucuucuaccaaguaauccau

SEQ ID NO: 89 - RNA, 28 nt, Artificial Sequence
  Synthetic
uagauugcucuucuaccaaguaauccau

SEQ ID NO: 90 - RNA, 67 nt, Artificial Sequence
  Synthetic
ggggauuuagacuaccccaaaaacgaaggggacuaaaacggauacuucaugaugccagcugcuguuc

SEQ ID NO: 91 - RNA, 28 nt, Artificial Sequence
  Synthetic
ggauacuucaugaugccagcugcuguuc

SEQ ID NO: 92 - RNA, 67 nt, Artificial Sequence
  Synthetic
ggggauuuagacuaccccaaaaacgaaggggacuaaaacggauuguucaugaugccagcugcuguuc

SEQ ID NO: 93 - RNA, 28 nt, Artificial Sequence
  Synthetic
ggauuguucaugaugccagcugcuguuc

SEQ ID NO: 94 - RNA, 67 nt, Artificial Sequence
  Synthetic
ggggauuuagacuaccccaaaaacgaaggggacuaaaacggguacuucaugaugccagcugccguuc

SEQ ID NO: 95 - RNA, 28 nt, Artificial Sequence
  Synthetic
ggguacuucaugaugccagcugccguuc

SEQ ID NO: 96 - RNA, 67 nt, Artificial Sequence
  Synthetic
ggggauuuagacuaccccaaaaacgaaggggacuaaaacggguuguucaugaugccagcugccguuc

SEQ ID NO: 97 - RNA, 28 nt, Artificial Sequence
  Synthetic
ggguuguucaugaugccagcugccguuc

SEQ ID NO: 98 - RNA, 67 nt, Artificial Sequence
  Synthetic
ggggauuuagacuaccccaaaaacgaaggggacuaaaacgguuuaaucccuucugguguguugaugu

SEQ ID NO: 99 - RNA, 28 nt, Artificial Sequence
  Synthetic
gguuuaaucccuucugguguguugaugu

SEQ ID NO: 100 - RNA, 67 nt, Artificial Sequence
  Synthetic
ggggauuuagacuaccccaaaaacgaaggggacuaaaacgguaaaaucccuucugguguguugaugu

SEQ ID NO: 101 - RNA, 28 nt, Artificial Sequence
  Synthetic
gguaaaaucccuucugguguguugaugu

SEQ ID NO: 102 - RNA, 67 nt, Artificial Sequence
  Synthetic
ggggauuuagacuaccccaaaaacgaaggggacuaaaacggguuaaucccuucugguguguuuaugu

SEQ ID NO: 103 - RNA, 28 nt, Artificial Sequence
  Synthetic
ggguuaaucccuucugguguguuuaugu

SEQ ID NO: 104 - RNA, 67 nt, Artificial Sequence
  Synthetic
ggggauuuagacuaccccaaaaacgaaggggacuaaaacgggaaaaucccuucugguguguuuaugu

SEQ ID NO: 105 - RNA, 28 nt, Artificial Sequence
  Synthetic
gggaaaaucccuucugguguguuuaugu

SEQ ID NO: 106 - RNA, 62 nt, Artificial Sequence
  Synthetic
ggggauuuagacuaccccaaaaacgaaggggacuaaaacggauacuucaugaugccagcugc

SEQ ID NO: 107 - RNA, 23 nt, Artificial Sequence
  Synthetic
ggauacuucaugaugccagcugc

SEQ ID NO: 108 - RNA, 62 nt, Artificial Sequence
  Synthetic
ggggauuuagacuaccccaaaaacgaaggggacuaaaacggauuguucaugaugccagcugc

SEQ ID NO: 109 - RNA, 23 nt, Artificial Sequence
  Synthetic
ggauuguucaugaugccagcugc

SEQ ID NO: 110 - RNA, 62 nt, Artificial Sequence
  Synthetic
ggggauuuagacuaccccaaaaacgaaggggacuaaaacggguacuucaugaugccagcugc

SEQ ID NO: 111 - RNA, 23 nt, Artificial Sequence
  Synthetic
ggguacuucaugaugccagcugc

SEQ ID NO: 112 - RNA, 62 nt, Artificial Sequence
  Synthetic
ggggauuuagacuaccccaaaaacgaaggggacuaaaacggguuguucaugaugccagcugc

SEQ ID NO: 113 - RNA, 23 nt, Artificial Sequence
  Synthetic
ggguuguucaugaugccagcugc

SEQ ID NO: 114 - RNA, 67 nt, Artificial Sequence
  Synthetic
ggggauuuagacuaccccaaaaacgaaggggacuaaaacuacuacgcuucagccuacugcaaaucca

SEQ ID NO: 115 - RNA, 28 nt, Artificial Sequence
  Synthetic
uacuacgcuucagccuacugcaaaucca

SEQ ID NO: 116 - RNA, 67 nt, Artificial Sequence
  Synthetic
ggggauuuagacuaccccaaaaacgaaggggacuaaaacuauuacgcuucagccuacugcaaaucca

SEQ ID NO: 117 - RNA, 28 nt, Artificial Sequence
  Synthetic
uauuacgcuucagccuacugcaaaucca

SEQ ID NO: 118 - RNA, 67 nt, Artificial Sequence
  Synthetic
ggggauuuagacuaccccaaaaacgaaggggacuaaaacgacagaaauguccuuuucccaauccuau

SEQ ID NO: 119 - RNA, 28 nt, Artificial Sequence
  Synthetic
gacagaaauguccuuuucccaauccuau

SEQ ID NO: 120 - RNA, 67 nt, Artificial Sequence
  Synthetic
ggggauuuagacuaccccaaaaacgaaggggacuaaaacgauagaaauguccuuuucccaauccuau

SEQ ID NO: 121 - RNA, 28 nt, Artificial Sequence
  Synthetic
gauagaaauguccuuuucccaauccuau

SEQ ID NO: 122 - RNA, 67 nt, Artificial Sequence
  Synthetic
ggggauuuagacuaccccaaaaacgaaggggacuaaaacaccgacucuuuuuuguauuuccaguaga

SEQ ID NO: 123 - RNA, 28 nt, Artificial Sequence
  Synthetic
accgacucuuuuuuguauuuccaguaga

SEQ ID NO: 124 - RNA, 67 nt, Artificial Sequence
  Synthetic
ggggauuuagacuaccccaaaaacgaaggggacuaaaacacugacucuuuuuuguauuuccaguaga

SEQ ID NO: 125 - RNA, 28 nt, Artificial Sequence
  Synthetic
acugacucuuuuuuguauuuccaguaga

SEQ ID NO: 126 - RNA, 67 nt, Artificial Sequence
  Synthetic
ggggauuuagacuaccccaaaaacgaaggggacuaaaaccuacaccuucuaccaccaccuccgccag

SEQ ID NO: 127 - RNA, 28 nt, Artificial Sequence
  Synthetic
cuacaccuucuaccaccaccuccgccag

SEQ ID NO: 128 - RNA, 67 nt, Artificial Sequence
  Synthetic
ggggauuuagacuaccccaaaaacgaaggggacuaaaaccugcaccuucuaccaccaccuccgccag

SEQ ID NO: 129 - RNA, 28 nt, Artificial Sequence
  Synthetic
cugcaccuucuaccaccaccuccgccag

SEQ ID NO: 130 - RNA, 67 nt, Artificial Sequence
  Synthetic
ggggauuuagacuaccccaaaaacgaaggggacuaaaacgagagcaacaggaagcaggauuccaagu

SEQ ID NO: 131 - RNA, 28 nt, Artificial Sequence
  Synthetic
gagagcaacaggaagcaggauuccaagu

SEQ ID NO: 132 - RNA, 67 nt, Artificial Sequence
  Synthetic
ggggauuuagacuaccccaaaaacgaaggggacuaaaacgaaagcaacaggaagcaggauuccaagu

SEQ ID NO: 133 - RNA, 28 nt, Artificial Sequence
  Synthetic
gaaagcaacaggaagcaggauuccaagu

SEQ ID NO: 134 - RNA, 67 nt, Artificial Sequence
  Synthetic
ggggauuuagacuaccccaaaaacgaaggggacuaaaacccaggccaaaaucugugaucuugacaug

SEQ ID NO: 135 - RNA, 28 nt, Artificial Sequence
  Synthetic
ccaggccaaaaucugugaucuugacaug

SEQ ID NO: 136 - RNA, 67 nt, Artificial Sequence
  Synthetic
ggggauuuagacuaccccaaaaacgaaggggacuaaaaccccggccaaaaucugugaucuugacaug

SEQ ID NO: 137 - RNA, 28 nt, Artificial Sequence
  Synthetic
cccggccaaaaucugugaucuugacaug

SEQ ID NO: 138 - RNA, 67 nt, Artificial Sequence
  Synthetic
ggggauuuagacuaccccaaaaacgaaggggacuaaaacucaguguagcuagaccaaaaucaccuau

SEQ ID NO: 139 - RNA, 28 nt, Artificial Sequence
  Synthetic
ucaguguagcuagaccaaaaucaccuau

SEQ ID NO: 140 - RNA, 67 nt, Artificial Sequence
  Synthetic
ggggauuuagacuaccccaaaaacgaaggggacuaaaacucuguguagcuagaccaaaaucaccuau

SEQ ID NO: 141 - RNA, 28 nt, Artificial Sequence
  Synthetic
ucuguguagcuagaccaaaaucaccuau

SEQ ID NO: 142 - RNA, 44 nt, Leptotrichia wadei
  misc_feature (16)..(44): N represents any  nucleotide
gcaaggggacuaaaacnnnnnnnnnnnnnnnnnnnnnnnnnnnn

SEQ ID NO: 143 - RNA, 44 nt, Leptotrichia wadei
  misc_feature (7)..(44): "n" represents any nucleotide
cgaaggggacuaaaacnnnnnnnnnnnnnnnnnnnnnnnnnnnn

SEQ ID NO: 144 - RNA, 70 nt, Artificial Sequence
  Synthetic
uacccggggauccucuagaaauauggauuacuugguagaacagcaaucuacucgaccugcaggcaugcaa

SEQ ID NO: 145 - RNA, 44 nt, Artificial Sequence
  Synthetic
  misc_feature (11)..(11): "n" represents any nucleotide
gcaaggggacnaaaacuagauugcuguucuaccaaguaauccau

SEQ ID NO: 146 - DNA, 10 bp, Artificial Sequence
  Synthetic
tagattgctg

SEQ ID NO: 147 - DNA, 10 bp, Artificial Sequence
  Synthetic
aagattgctg

SEQ ID NO: 148 - DNA, 10 bp, Artificial Sequence
  Synthetic
ttgattgctg

SEQ ID NO: 149 - DNA, 10 bp, Artificial Sequence
  Synthetic
tacattgctg

SEQ ID NO: 150 - DNA, 10 bp, Artificial Sequence
  Synthetic
tagtttgctg

SEQ ID NO: 151 - DNA, 10 bp, Artificial Sequence
  Synthetic
tagaatgctg

SEQ ID NO: 152 - DNA, 10 bp, Artificial Sequence
  Synthetic
tagatagctg

SEQ ID NO: 153 - DNA, 10 bp, Artificial Sequence
  Synthetic
tagattcctg

SEQ ID NO: 154 - DNA, 10 bp, Artificial Sequence
  Synthetic
tagattggtg

SEQ ID NO: 155 - DNA, 10 bp, Artificial Sequence
  Synthetic
tagattgcag

SEQ ID NO: 156 - DNA, 10 bp, Artificial Sequence
  Synthetic
tagattgctc

SEQ ID NO: 157 - DNA, 10 bp, Artificial Sequence
  Synthetic
atctaacgac

SEQ ID NO: 158 - DNA, 10 bp, Artificial Sequence
  Synthetic
atgtaacgac

SEQ ID NO: 159 - DNA, 10 bp, Artificial Sequence
  Synthetic
atgtatcgac

SEQ ID NO: 160 - RNA, 58 nt, Flavivirus sp.
gugcugcccagaagagaacagcagcuggcaucaugaagaaucccguuguggauggaau

SEQ ID NO: 161 - RNA, 44 nt, Artificial Sequence
  Synthetic
gcaaggggacuaaaacggauacuucaugaugccagcugcuguuc

SEQ ID NO: 162 - RNA, 58 nt, Artificial Sequence; identical to SEQ ID NO: 160
  Synthetic

SEQ ID NO: 163 - RNA, 44 nt, Artificial Sequence; identical to SEQ ID NO: 161
  Synthetic

SEQ ID NO: 164 - RNA, 58 nt, Artificial Sequence
  Synthetic
gugcugcccagaagagaacggcagcuggcaucaugaagaaccccguuguggauggaau

SEQ ID NO: 165 - RNA, 58 nt, Flavivirus sp.; identical to SEQ ID NO: 160

SEQ ID NO: 166 - RNA, 28 nt, Flavivirus sp.
ggauuguucaugaugccagcugcuguuc

SEQ ID NO: 167 - RNA, 44 nt, Flavivirus sp.; identical to SEQ ID NO: 161

SEQ ID NO: 168 - RNA, 58 nt, Flavivirus sp.
gugcugcccagaagagaacggcagcuggcaucaugaagaacccuguuguggauggaau

SEQ ID NO: 169 - RNA, 28 nt, Flavivirus sp.
ggguacuucaugaugccagcugccguuc

SEQ ID NO: 170 - RNA, 44 nt, Flavivirus sp.
gcaaggggacuaaaacggguuguucaugaugccagcugccguuc

SEQ ID NO: 171 - RNA, 58 nt, Flavivirus sp.
aaaugcugcuggacaacaucaacacaccagaagggauuauaccagcucucuuugaacc

SEQ ID NO: 172 - RNA, 28 nt, Artificial Sequence
  Synthetic
gguaaaaucccuucugguguguugaugu

SEQ ID NO: 173 - RNA, 44 nt, Artificial Sequence
  Synthetic
gcaaggggacuaaaacgguuuaaucccuucugguguguugaugu

SEQ ID NO: 174 - RNA, 58 nt, Flavivirus sp
aaaugcuccuugacaacauaaacacaccagaagggauuaucccagcccucuuugagcc

SEQ ID NO: 175 - RNA, 28 nt, Artificial Sequence
  Synthetic
uguauuuguguggucuucccuaauuggg

SEQ ID NO: 176 - RNA, 44 nt, Artificial Sequence
  Synthetic
gcaaggggacuaaaacgggaaaaucccuucugguguguuuaugu

SEQ ID NO: 177 - RNA, 39 nt, Artificial Sequence
  Synthetic
caccgcagcaugucaagaucacagauuuugggcgggcca

SEQ ID NO: 178 - RNA, 28 nt, Artificial Sequence
  Synthetic
cccggccaaaaucugugaucuugacaug

SEQ ID NO: 179 - RNA, 28 nt, Artificial Sequence
  Synthetic
ccaggccaaaaucugugaucuugacaug

SEQ ID NO: 180 - RNA, 39 nt, Artificial Sequence
  Synthetic
caguaaaaauaggugauuuuggucuagcuacagagaaau

SEQ ID NO: 181 - RNA, 28 nt, Artificial Sequence
  Synthetic
ucuguguagcuagaccaaaaucaccuau

SEQ ID NO: 182 - RNA, 28 nt, Artificial Sequence
  Synthetic
ucaguguagcuagaccaaaaucaccuau

SEQ ID NO: 183 - DNA, 25 bp, Artificial Sequence
  Synthetic
  misc_feature (25)..(25): 3ThioMC3-D
ttataactattcctaaaaaaaaaaa

SEQ ID NO: 184 - DNA, 26 bp, Artificial Sequence
  Synthetic
  misc_feature (1)..(1): 5ThioMC6-D
aaaaaaaaaactcccctaataacaat

SEQ ID NO: 185 - RNA, 45 nt, Artificial Sequence
  Synthetic
ggguaggaauaguuauaauuucccuuucccauuguuauuagggag

SEQ ID NO: 186 - DNA, 66 bp, Artificial Sequence
  Synthetic
tgtggttggtgtggttggttcatggtcatattggtttttttttttttttccaaccacagtctctgt

SEQ ID NO: 187 - DNA, 35 bp, Artificial Sequence
  Synthetic
ggttggtagtctcgaattgctctctttcactggcc

SEQ ID NO: 188 - DNA, 48 bp, Artificial Sequence
  Synthetic
gaaattaatacgactcactatagggggttggttcatggtcatattggt

SEQ ID NO: 189 - DNA, 57 bp, Artificial Sequence
  Synthetic
gaaattaatacgactcactatagggggttggtgtggttggttcatggtcatattggt

SEQ ID NO: 190 - DNA, 31 bp, Artificial Sequence
  Synthetic
ggccagtgaaagagagcaattcgagactacc

SEQ ID NO: 191 - RNA, 64 nt, Artificial Sequence
  Synthetic
gauuuagacuaccccaaaaacgaaggggacuaaaacccagugaaagagagcaauucgagacuac

SEQ ID NO: 192 - RNA, 64 nt, Artificial Sequence
  Synthetic
gauuuagacuaccccaaaaacgaaggggacuaaaacaaagagagcaauucgagacuaccaacca

SEQ ID NO: 193 - RNA, 64 nt, Artificial Sequence
  Synthetic
gauuuagacuaccccaaaaacgaaggggacuaaaacagacuaccaaccacagagacugugguug

SEQ ID NO: 194 - DNA, 106 bp, Artificial Sequence
  Synthetic
gttagatcgcaagcatatcattgcgcttgcgatctaactgctgcgccgccgggaaaatactgtacggttagatcgcatagtctcgaattgctctctttcactggcc

SEQ ID NO: 195 - DNA, 71 bp, Artificial Sequence
  Synthetic
gttagatcgcaagcatatcattgcgcttgcgatctaactgctgcgccgccgggaaaatactgtacggttag

SEQ ID NO: 196 - DNA, 35 bp, Artificial Sequence
  Synthetic
atcgcatagtctcgaattgctctctttcactggcc

SEQ ID NO: 197 - DNA, 50 bp, Artificial Sequence
  Synthetic
gaaattaatacgactcactatagggatcgcaagcatatcattgcgcttgc

SEQ ID NO: 198 - DNA, 31 bp, Artificial Sequence
  Synthetic
ggccagtgaaagagagcaattcgagactatg

SEQ ID NO: 199 - RNA, 64 nt, Artificial Sequence
  Synthetic
gauuuagacuaccccaaaaacgaaggggacuaaaacccagugaaagagagcaauucgagacuau

SEQ ID NO: 200 - RNA, 64 nt, Artificial Sequence
  Synthetic
gauuuagacuaccccaaaaacgaaggggacuaaaacagagcaauucgagacuaugcgaucuaac

SEQ ID NO: 201 - RNA, 64 nt, Artificial Sequence
  Synthetic
gauuuagacuaccccaaaaacgaaggggacuaaaacacuaugcgaucuaaccguacaguauuuu

SEQ ID NO: 202 - DNA, 66 bp, Artificial Sequence; identical to SEQ ID NO: 186
  Synthetic

SEQ ID NO: 203 - DNA, 25 bp, Artificial Sequence
  Synthetic
ggttggtagtctcgaattgctctct

SEQ ID NO: 204 - protein, 18 aa, Leptotrichia shahii
IRKFTKIGTNERNRILHA

SEQ ID NO: 205 - protein, 15 aa, Leptotrichia shahii
SIRNYISHFYIVRNP

SEQ ID NO: 206 - protein, 18 aa, Lachnospiraceae bacterium MA2020
LYSLKSMLYSMRNSSFHF

SEQ ID NO: 207 - protein, 15 aa, Lachnospiraceae bacterium MA2020
IFRNEIDHFHYFYDR

SEQ ID NO: 208 - protein, 18 aa, Lachnospiraceae
LTDLKDVIYSMRNDSFHY

SEQ ID NO: 209 - protein, 15 aa, Lachnospiraceae
ELRNYIEHFRYYSSF

SEQ ID NO: 210 - protein, 18 aa, Clostridium aminophilum DSM 10710
ADDLRKAIYSLRNETFHF

SEQ ID NO: 211 - protein, 15 aa, Clostridium aminophilum DSM 10710
DVRKYVDHFKYYATS

SEQ ID NO: 212 - protein, 18 aa, Carnobacterium gallinarum DSM 4847
IWALRGSVQQIRNEIFHS

SEQ ID NO: 213 - protein, 15 aa, Carnobacterium gallinarum
KIRNQTAHLSVLQLE

SEQ ID NO: 214 - protein, 18 aa, Carnobacterium gallinarum DSM 4847
LWAIRGAVQRVRNQIFHQ

SEQ ID NO: 215 - protein, 15 aa, Carnobacterium gallinarum DSM 4847
EIRNNIAHLHVLRND

SEQ ID NO: 216 - protein, 18 aa, Paludibacter propionicigenes WB4
LWGIRGAVQQIRNNVNHY

SEQ ID NO: 217 - protein, 15 aa, Paludibacter propionicigenes WB4
DIRNHIAHFNYLTKD

SEQ ID NO: 218 - protein, 18 aa, Listeria weihenstephanensis FSL R9-0317
IWAIRGSIQQIRNEVYHC

SEQ ID NO: 219 - protein, 15 aa, Listeria weihenstephanensis FSL R9-0317
NARNHIAHLNYLSLK

SEQ ID NO: 220 - protein, 18 aa, Listeriaceae bacterium FSL M6-0635
IWAIRGSIQQIRNEVYHC

SEQ ID NO: 221 - protein, 15 aa, Listeriaceae bacterium FSL M6-0635
NARNHIAHLNYLSLK

SEQ ID NO: 222 - protein, 18 aa, Leptotrichia wadei F0279
VFALLRYLRGCRNQTFHL

SEQ ID NO: 223 - protein, 15 aa, Leptotrichia wadei F0279
YIRNYIAHFNYIPHA

SEQ ID NO: 224 - protein, 18 aa, Rhodobacter capsulatus SB 1003
VFALLRYLRGCRNQTFHL

SEQ ID NO: 225 - protein, 15 aa, Artificial Sequence
  Synthetic
QTRKDLAHFNVLDRA

SEQ ID NO: 226 - protein, 18 aa, Rhodobacter capsulatus R12
VFALLRYLRGCRNQTFHL

SEQ ID NO: 227 - protein, 15 aa, Rhodobacter capsulatus R121
QTRKDLAHFNVLDRA

SEQ ID NO: 228 - protein, 18 aa, Rhodobacter capsulatus DE442
VFALLRYLRGCRNQTFHL

SEQ ID NO: 229 - protein, 15 aa, Rhodobacter capsulatus DE-442
QTRKDLAHFNVLDRA

SEQ ID NO: 230 - protein, 18 aa, Leptotrichia wadei (Lw2)
FANIDEAISSIRHGIVHF

SEQ ID NO: 231 - protein, 15 aa, Leptotrichia wadei (Lw2)
YIRNYIAHFNYIPHA

SEQ ID NO: 232 - protein, 18 aa, Listeria seeligen
SWGLRGAIAPIRNEIIHL

SEQ ID NO: 233 - protein, 15 aa, Listeria seeligen
EKRNNISHFNYLNGQ

SEQ ID NO: 234 - RNA, 62 nt, Artificial Sequence
  Synthetic
ggggauuuagacuaccccaaaaacgaaggggacuaaaacuagaaugcuguucuaccaaguaa

SEQ ID NO: 235 - RNA, 23 nt, Artificial Sequence
  Synthetic
uagaaugcuguucuaccaaguaa

SEQ ID NO: 236 - RNA, 62 nt, Artificial Sequence
  GGGGAUUUAGACUACCCCAAAAACGAAGGGGACUAAAACUAGAUAGCUGUUCUACCAAGUAA
ggggauuuagacuaccccaaaaacgaaggggacuaaaacuagauagcuguucuaccaaguaa

SEQ ID NO: 237 - RNA, 23 nt, Artificial Sequence
  Synthetic
uagauagcuguucuaccaaguaa

SEQ ID NO: 238 - RNA, 62 nt, Artificial Sequence
  Synthetic
ggggauuuagacuaccccaaaaacgaaggggacuaaaacuagauuccuguucuaccaaguaa

SEQ ID NO: 239 - RNA, 23 nt, Artificial Sequence
  Synthetic
uagauuccuguucuaccaaguaa

SEQ ID NO: 240 - RNA, 59 nt, Artificial Sequence
  Synthetic
ggggauuuagacuaccccaaaaacgaaggggacuaaaacaagauugcuguucuaccaag

SEQ ID NO: 241 - RNA, 20 nt, Artificial Sequence
  Synthetic
aagauugcuguucuaccaag

SEQ ID NO: 242 - RNA, 59 nt, Artificial Sequence
  Synthetic
ggggauuuagacuaccccaaaaacgaaggggacuaaaacuugauugcuguucuaccaag

SEQ ID NO: 243 - RNA, 20 nt, Artificial Sequence
  Synthetic
uugauugcuguucuaccaag

SEQ ID NO: 244 - RNA, 59 nt, Artificial Sequence
  Synthetic
ggggauuuagacuaccccaaaaacgaaggggacuaaaacuaguuugcuguucuaccaag

SEQ ID NO: 245 - RNA, 20 nt, Artificial Sequence
  Synthetic
uaguuugcuguucuaccaag

SEQ ID NO: 246 - RNA, 59 nt, Artificial Sequence
  Synthetic
ggggauuuagacuaccccaaaaacgaaggggacuaaaacuagaaugcuguucuaccaag

SEQ ID NO: 247 - RNA, 20 nt, Artificial Sequence
  Synthetic
uagaaugcuguucuaccaag

SEQ ID NO: 248 - RNA, 59 nt, Artificial Sequence
  Synthetic
ggggauuuagacuaccccaaaaacgaaggggacuaaaacuagauagcuguucuaccaag

SEQ ID NO: 249 - RNA, 20 nt, Artificial Sequence
  Synthetic
uagauagcuguucuaccaag

SEQ ID NO: 250 - RNA, 59 nt, Artificial Sequence
  Synthetic
ggggauuuagacuaccccaaaaacgaaggggacuaaaacuagauuccuguucuaccaag

SEQ ID NO: 251 - RNA, 20 nt, Artificial Sequence
  UAGAUUCCUGUUCUACCAAG
uagauuccuguucuaccaag

SEQ ID NO: 252 - RNA, 67 nt, Artificial Sequence
  Synthetic
ggggauuuagacuaccccaaaaacgaaggggacuaaaaccuagauugcuguucuaccaaguaaucca

SEQ ID NO: 253 - RNA, 28 nt, Artificial Sequence
  Synthetic
cuagauugcuguucuaccaaguaaucca

SEQ ID NO: 254 - RNA, 67 nt, Artificial Sequence
  Synthetic
ggggauuuagacuaccccaaaaacgaaggggacuaaaacgaagauugcuguucuaccaaguaaucca

SEQ ID NO: 255 - RNA, 28 nt, Artificial Seqeunce
  Synthetic
gaagauugcuguucuaccaaguaaucca

SEQ ID NO: 256 - RNA, 67 nt, Artificial Sequence
  Synthetic
ggggauuuagacuaccccaaaaacgaaggggacuaaaacguugauugcuguucuaccaaguaaucca

SEQ ID NO: 257 - RNA, 28 nt, Artificial Sequence
  Synthetic
guugauugcuguucuaccaaguaaucca

SEQ ID NO: 258 - RNA, 67 nt, Artificial Sequence
  Synthetic
ggggauuuagacuaccccaaaaacgaaggggacuaaaacguaguuugcuguucuaccaaguaaucca

SEQ ID NO: 259 - RNA, 28 nt, Artificial Sequence
  Synthetic
guaguuugcuguucuaccaaguaaucca

SEQ ID NO: 260 - RNA, 67 nt, Artificial Sequence
  Synthetic
ggggauuuagacuaccccaaaaacgaaggggacuaaaacguagaaugcuguucuaccaaguaaucca

SEQ ID NO: 261 - RNA, 28 nt, Artificial Sequence
  Synthetic
guagaaugcuguucuaccaaguaaucca

SEQ ID NO: 262 - RNA, 67 nt, Artificial Sequence
  Synthetic
ggggauuuagacuaccccaaaaacgaaggggacuaaaacguagauagcuguucuaccaaguaaucca

SEQ ID NO: 263 - RNA, 28 nt, Artificial Sequence
  Synthetic
guagauagcuguucuaccaaguaaucca

SEQ ID NO: 264 - RNA, 67 nt, Artificial Sequence
  Synthetic
ggggauuuagacuaccccaaaaacgaaggggacuaaaacacuagauugcuguucuaccaaguaaucc

SEQ ID NO: 265 - RNA, 28 nt, Artificial Sequence
  Synthetic
acuagauugcuguucuaccaaguaaucc

SEQ ID NO: 266 - RNA, 67 nt, Artificial Sequence
  Synthetic
ggggauuuagacuaccccaaaaacgaaggggacuaaaacagaagauugcuguucuaccaaguaaucc

SEQ ID NO: 267 - RNA, 28 nt, Artificial Sequence
  Synthetic
agaagauugcuguucuaccaaguaaucc

SEQ ID NO: 268 - RNA, 67 nt, Artificial Sequence
  Synthetic
ggggauuuagacuaccccaaaaacgaaggggacuaaaacaguugauugcuguucuaccaaguaaucc

SEQ ID NO: 269 - RNA, 28 nt, Artificial Sequence
  Synthetic
aguugauugcuguucuaccaaguaaucc

SEQ ID NO: 270 - RNA, 67 nt, Artificial Sequence
  Synthetic
ggggauuuagacuaccccaaaaacgaaggggacuaaaacaguaguuugcuguucuaccaaguaaucc

SEQ ID NO: 271 - RNA, 28 nt, Artificial Sequence
  Synthetic
aguaguuugcuguucuaccaaguaaucc

SEQ ID NO: 272 - RNA, 67 nt, Artificial Sequence
  Synthetic
ggggauuuagacuaccccaaaaacgaaggggacuaaaacaguagaaugcuguucuaccaaguaaucc

SEQ ID NO: 273 - RNA, 28 nt, Artificial Sequence
  Synthetic
aguagaaugcuguucuaccaaguaaucc

SEQ ID NO: 274 - RNA, 67 nt, Artificial Sequence
  Synthetic
ggggauuuagacuaccccaaaaacgaaggggacuaaaacaguagauagcuguucuaccaaguaaucc

SEQ ID NO: 275 - RNA, 28 nt, Artificial Sequence
  Synthetic
aguagauagcuguucuaccaaguaaucc

SEQ ID NO: 276 - RNA, 67 nt, Artificial Sequence
  Synthetic
ggggauuuagacuaccccaaaaacgaaggggacuaaaacgacuagauugcuguucuaccaaguaauc

SEQ ID NO: 277 - RNA, 28 nt, Artificial Sequence
  Synthetic
gacuagauugcuguucuaccaaguaauc

SEQ ID NO: 278 - RNA, 67 nt, Artificial Sequence
  Synthetic
ggggauuuagacuaccccaaaaacgaaggggacuaaaacgagaagauugcuguucuaccaaguaauc

SEQ ID NO: 279 - RNA, 28 nt, Artificial Sequence
  Synthetic
gagaagauugcuguucuaccaaguaauc

SEQ ID NO: 280 - RNA, 67 nt, Artificial Sequence
  Synthetic
ggggauuuagacuaccccaaaaacgaaggggacuaaaacgaguugauugcuguucuaccaaguaauc

SEQ ID NO: 281 - RNA, 28 nt, Artificial Sequence
  Synthetic
gaguugauugcuguucuaccaaguaauc

SEQ ID NO: 282 - RNA, 67 nt, Artificial Sequence
  Synthetic
ggggauuuagacuaccccaaaaacgaaggggacuaaaacgaguaguuugcuguucuaccaaguaauc

SEQ ID NO: 283 - RNA, 28 nt, Artificial Sequence
  Synthetic
gaguaguuugcuguucuaccaaguaauc

SEQ ID NO: 284 - RNA, 67 nt, Artificial Sequence
  Synthetic
ggggauuuagacuaccccaaaaacgaaggggacuaaaacgaguagaaugcuguucuaccaaguaauc

SEQ ID NO: 285 - RNA, 28 nt, Artificial Sequence
  Synthetic
gaguagaaugcuguucuaccaaguaauc

SEQ ID NO: 286 - RNA, 67 nt, Artificial Sequence
  Synthetic
ggggauuuagacuaccccaaaaacgaaggggacuaaaacgaguagauagcuguucuaccaaguaauc

SEQ ID NO: 287 - RNA, 28 nt, Artificial Sequence
  Synthetic
gaguagauagcuguucuaccaaguaauc

SEQ ID NO: 288 - RNA, 176 nt, Artificial Sequence
  Synthetic
gggggccagugaauucgagcucgguacccggggauccucuagaaauauggauuacuugguagaacagcaaucuacucgaccugcaggcaugcaagcuuggcguaaucauggucauagcuguuuccuguguuuauccgcucacaauuccacacaacauacgagccggaagcauaaag

SEQ ID NO: 289 - RNA, 176 nt, Artificial Sequence
  Synthetic
gggggccagugaauucgagcucgguacccggggauccucuagaaauauggauuacuugguagaacagcaaucuagucgaccugcaggcaugcaagcuuggcguaaucauggucauagcuguuuccuguguuuauccgcucacaauuccacacaacauacgagccggaagcauaaag

SEQ ID NO: 290 - RNA, 176 nt, Artificial Sequence
  Synthetic
gggggccagugaauucgagcucgguacccggggauccucuagaaauauggauuacuugguagaacagcaaucuaaucgaccugcaggcaugcaagcuuggcguaaucauggucauagcuguuuccuguguuuauccgcucacaauuccacacaacauacgagccggaagcauaaag

SEQ ID NO: 291 - RNA, 176 nt, Artificial Sequence
  Synthetic
gggggccagugaauucgagcucgguacccggggauccucuagaaauauggauuacuugguagaacagcaaucuauucgaccugcaggcaugcaagcuuggcguaaucauggucauagcuguuuccuguguuuauccgcucacaauuccacacaacauacgagccggaagcauaaag

SEQ ID NO: 292 - DNA, 173 bp, Artificial Sequence
  Synthetic
ggccagtgaattcgagctcggtacccggggatcctctagaaatatggattacttggtagaacagcaatctactcgacctgcaggcatgcaagcttggcgtaatcatggtcatagctgtttcctgtgtttatccgctcacaattccacacaacatacgagccggaagcataaag

SEQ ID NO: 293 - DNA, 189 bp, Artificial Sequence
  Synthetic
gagtacgtccgcttcaccggctacccctgctcctggaccttctaccaccacctccgccaggagatcctccaggagttcaccctgcacgaccacgtgcgggaggaggcccagaagttcctgcggggcctgcaggtgaacgggagccggccgggcacctttgtaggggtccatgttcgccgaggggactat

SEQ ID NO: 294 - RNA, 334 nt, Artificial Sequence
  Synthetic
agcuggaguguuguuugguaugggcaaagggaugccauucuacgcaugggacuuuggagucccgcugcuaaugauagguugcuacucacaauuaacaccccugacccuaauaguggccaucauuuugcucguggcgcacuacauguacuugaucccagggcugcaggcagcagcugcgcgugcugcccagaagagaacggcagcuggcaucaugaagaacccuguuguggauggaauaguggugacugacauugacacaaugacaauugacccccaaguggagaaaaagaugggacaggugcuacucauagcaguagccgucuccagcgccaua

SEQ ID NO: 295 - RNA, 334 nt, Artificial Sequence
  Synthetic
ggcagcuauauugaugggacuugacaagggauggccaauaucgaagauggacauaggaguuccacuucucgccuuagggugcuauucccaggugaacccauugacacugacagcggcgguguugauguuaguggcucauuaugccauaauuggaccaggacugcaagcaaaggccacuagagaagcucaaaaaaggacagcggccggaauaaugaaaaauccaaccguagacgggauuguugcaauagacuuggauccugugguuuaugauacaaaauuugaaaaacagcuaggccaaauaauguuacugauacuuuguacaucacagauccuc

SEQ ID NO: 296 - RNA, 337 nt, Artificial Sequence
  Synthetic
gggagcuggaguguuguuugguaugggcaaagggaugccauucuacgcaugggacuuuggagucccgcugcuaaugauagguugcuacucacaauuaacaccccugacccuaauaguggccaucauuuugcucguggcgcacuacauguacuugaucccagggcugcaggcagcagcugcgcgugcugcccagaagagaacggcagcuggcaucaugaagaacccuguuguggauggaauaguggugacugacauugacacaaugacaauugacccccaaguggagaaaaagaugggacaggugcuacucauagcaguagccgucuccagcgccaua

SEQ ID NO: 297 - RNA, 173 nt, Artificial Sequence
  Synthetic
gggaaccuugauaguggcuaucauucugcuuguggcacacuauauguacuugaucccaggccuacaggcagcagcagcgcgugcugcccagaagagaacagcagcuggcaucaugaagaaucccguuguggauggaauagugguaacugacauugacacaaugacaauugacc

SEQ ID NO: 298 - RNA, 173 nt, Artificial Sequence
  Synthetic
ggggacccuaauaguggccaucauuuugcucguggcgcacuacauguacuugaucccagggcugcaggcagcagcugcgcgugcugcccagaagagaacggcagcuggcaucaugaagaacccuguuguggauggaauaguggugacugacauugacacaaugacaauugacc

SEQ ID NO: 299 - RNA, 173 nt, Artificial Sequence
  Synthetic
gggaguacauauucaggggccaaccucucaacaaugacgaagaccaugcucacuggacagaagcaaaaaugcugcuggacaacaucaacacaccagaagggauuauaccagcucucuuugaaccagaaagggagaagucagccgccauagacggugaauaccgccugaagggu

SEQ ID NO: 300 - RNA, 173 nt, Artificial Sequence
  Synthetic
gggaguacauuuacaugggacagccuucaaacaacgaugaggaucacgcucauuggacagaagcaaaaaugcuccuugacaacauaaacacaccagaagggauuaucccagcccucuuugagccggagagaggaaaaagugcagcaauagacggggaauacagacugcggggu

SEQ ID NO: 301 - RNA, 176 nt, Artificial Sequence
  Synthetic
gggggccagugaauucgagcucgguacccggggauccucuagaaauauggauuacuugguagaacagcaauguacucgaccugcaggcaugcaagcuuggcguaaucauggucauagcuguuuccuguguuuauccgcucacaauuccacacaacauacgagccggaagcauaaag

SEQ ID NO: 302 - RNA, 176 nt, Artificial Sequence
  Synthetic
gggggccagugaauucgagcucgguacccggggauccucuagaaauauggauuacuugguagaacagcuauguacucgaccugcaggcaugcaagcuuggcguaaucauggucauagcuguuuccuguguuuauccgcucacaauuccacacaacauacgagccggaagcauaaag

SEQ ID NO: 303 - RNA, 62 nt, Artificial Sequence
  Synthetic
ggggauuuagacuaccccaaaaacgaaggggacuaaaacaagauugcuguucuaccaaguaa

SEQ ID NO: 304 - RNA, 23 nt, Artificial Sequence
  Synthetic
aagauugcuguucuaccaaguaa

SEQ ID NO: 305 - RNA, 62 nt, Artificial Sequence
  Synthetic
ggggauuuagacuaccccaaaaacgaaggggacuaaaacuugauugcuguucuaccaaguaa

SEQ ID NO: 306 - RNA, 23 nt, Artificial Sequence
  Synthetic
uugauugcuguucuaccaaguaa

SEQ ID NO: 307 - RNA, 62 nt, Artificial Sequence
  Synthetic
ggggauuuagacuaccccaaaaacgaaggggacuaaaacuaguuugcuguucuaccaaguaa

SEQ ID NO: 308 - RNA, 23 nt, Artificial Sequence
  Synthetic
uaguuugcuguucuaccaaguaa

SEQ ID NO: 309 - protein, 1159 aa, Leptorichia buccalis C-1013-b
MKVTKVGGISHKKYTSEGRLVKSESEENRTDERLSALLNMRLDMYIKNPSSTETKENQKRIGKLKKFFSNKMVYLKDNTLSLKNGKKENIDREYSETDILESDVRDKKNFAVLKKIYLNENVNSEELEVFRNDIKKKLNKINSLKYSFEKNKANYQKINENNIEKVEGKSKRNIIYDYYRESAKRDAYVSNVKEAFDKLYKEEDIAKLVLEIENLTKLEKYKIREFYHEIIGRKNDKENFAKIIYEEIQNVNNMKELIEKVPDMSELKKSQVFYKYYLDKEELNDKNIKYAFCHFVEIEMSQLLKNYVYKRLSNISNDKIKRIFEYQNLKKLIENKLLNKLDTYVRNCGKYNYYLQDGEIATSDFIARNRQNEAFLRNIIGVSSVAYFSLRNILETENENDITGRMRGKTVKNNKGEEKYVSGEVDKIYNENKKNEVKENLKMFYSYDFNMDNKNEIEDFFANIDEAISSIRHGIVHFNLELEGKDIFAFKNIAPSEISKKMFQNEINEKKLKLKIFRQLNSANVFRYLEKYKILNYLKRTRFEFVNKNIPFVPSFTKLYSRIDDLKNSLGIYWKTPKTNDDNKTKEIIDAQIYLLKNIYYGEFLNYFMSNNGNFFEISKEIIELNKNDKRNLKTGFYKLQKFEDIQEKIPKEYLANIQSLYMINAGNQDEEEKDTYIDFIQKIFLKGFMTYLANNGRLSLIYIGSDEETNTSLAEKKQEFDKFLKKYEQNNNIKIPYEINEFLREIKLGNILKYTERLNMFYLILKLLNHKELTNLKGSLEKYQSANKEEAFSDQLELINLLNLDNNRVTEDFELEADEIGKFLDFNGNKVKDNKELKKFDTNKIYFDGENIIKHRAFYNIKKYGMLNLLEKIADKAGYKISIEELKKYSNKKNEIEKNHKMQENLHRKYARPRKDEKFTDEDYESYKQAIENIEEYTHLKNKVEFNELNLLQGLLLRILHRLVGYTSIWERDLRFRLKGEFPENQYIEEIFNFENKKNVKYKGGQIVEKYIKFYKELHQNDEVKINKYSSANIKVLKQEKKDLYIRNYIAHFNYIPHAEISLLEVLENLRKLLSYDRKLKNAVMKSVVDILKEYGFVATFKIGADKKIGIQTLESEKIVHLKNLKKKKLMTDRNSEELCKLVKIMFEYKMEEKKSEN

SEQ ID NO: 310 - protein, 1285 aa, Herbinix hemicellulosilytica
MKLTRRRISGNSVDQKITAAFYRDMSQGLLYYDSEDNDCTDKVIESMDFERSWRGRILKNGEDDKNPFYMFVKGLVGSNDKIVCEPIDVDSDPDNLDILINKNLTGFGRNLKAPDSNDTLENLIRKIQAGIPEEEVLPELKKIKEMIQKDIVNRKEQLLKSIKNNRIPFSLEGSKLVPSTKKMKWLFKLIDVPNKTFNEKMLEKYWEIYDYDKLKANITNRLDKTDKKARSISRAVSEELREYHKNLRTNYNRFVSGDRPAAGLDNGGSAKYNPDKEEFLLFLKEVEQYFKKYFPVKSKHSNKSKDKSLVDKYKNYCSYKVVKKEVNRSIINQLVAGLIQQGKLLYYFYYNDTWQEDFLNSYGLSYIQVEEAFKKSVMTSLSWGINRLTSFFIDDSNTVKFDDITTKKAKEAIESNYFNKLRTCSRMQDHFKEKLAFFYPVYVKDKKDRPDDDIENLIVLVKNAIESVSYLRNRTFHFKESSLLELLKELDDKNSGQNKIDYSVAAEFIKRDIENLYDVFREQIRSLGIAEYYKADMISDCFKTCGLEFALYSPKNSLMPAFKNVYKRGANLNKAYIRDKGPKETGDQGQNSYKALEEYRELTWYIEVKNNDQSYNAYKNLLQLIYYHAFLPEVRENEALITDFINRTKEWNRKETEERLNTKNNKKHKNFDENDDITVNTYRYESIPDYQGESLDDYLKVLQRKQMARAKEVNEKEEGNNNYIQFIRDVVVWAFGAYLENKLKNYKNELQPPLSKENIGLNDTLKELFPEEKVKSPFNIKCRFSISTFIDNKGKSTDNTSAEAVKTDGKEDEKDKKNIKRKDLLCFYLFLRLLDENEICKLQHQFIKYRCSLKERRFPGNRTKLEKETELLAELEELMELVRFTMPSIPEISAKAESGYDTMIKKYFKDFIEKKVFKNPKTSNLYYHSDSKTPVTRKYMALLMRSAPLHLYKDIFKGYYLITKKECLEYIKLSNIIKDYQNSLNELHEQLERIKLKSEKQNGKDSLYLDKKDFYKVKEYVENLEQVARYKHLQHKINFESLYRIFRIHVDIAARMVGYTQDWERDMHFLFKALVYNGVLEERRFEAIFNNNDDNNDGRIVKKIQNNLNNKNRELVSMLCWNKKLNKNEFGAIIWKRNPIAHLNHFTQTEQNSKSSLESLINSLRILLAYDRKRQNAVTKTINDLLLNDYHIRIKWEGRVDEGQIYFNIKEKEDIENEPIIHLKHLHKKDCYIYKNSYMFDKQKEWICNGIKEEVYDKSILKCIGNLFKFDYEDKNKSSANPKHT

SEQ ID NO: 311 - protein, 1344 aa, Eubacterium rectale
MLRRDKEVKKLYNVFNQIQVGTKPKKWNNDEKLSPEENERRAQQKNIKMKNYKWREACSKYVESSQRIINDVIFYSYRKAKNKLRYMRKNEDILKKMQEAEKLSKFSGGKLEDFVAYTLRKSLVVSKYDTQEFDSLAAMVVFLECIGKNNISDHEREIVCKLLELIRKDFSKLDPNVKGSQGANIVRSVRNQNMIVQPQGDRFLFPQVYAKENETVTNKNVEKEGLNEFLLNYANLDDEKRAESLRKLRRILDVYFSAPNHYEKDMDITLSDNIEKEKFNVWEKHECGKKETGLFVDIPDVLMEAEAENIKLDAVVEKRERKVLNDRVRKQNIICYRYTRAVVEKYNSNEPLFFENNAINQYWIHHIENAVERILKNCKAGKLFKLRKGYLAEKVWKDAINLISIKYIALGKAVYNFALDDIWKDKKNKELGIVDERIRNGITSFDYEMIKAHENLQRELAVDIAFSVNNLARAVCDMSNLGNKESDFLLWKRNDIADKLKNKDDMASVSAVLQFFGGKSSWDINIFKDAYKGKKKYNYEVRFIDDLRKAIYCARNENFHFKTALVNDEKWNTELFGKIFERETEFCLNVEKDRFYSNNLYMFYQVSELRNMLDHLYSRSVSRAAQVPSYNSVIVRTAFPEYITNVLGYQKPSYDADTLGKWYSACYYLLKEIYYNSFLQSDRALQLFEKSVKTLSWDDKKQQRAVDNFKDHFSDIKSACTSLAQVCQIYMTEYNQQNNQIKKVRSSNDSIFDQPVYQHYKVLLKKAIANAFADYLKNNKDLFGFIGKPFKANEIREIDKEQFLPDWTSRKYEALCIEVSGSQELQKWYIVGKFLNARSLNLMVGSMRSYIQYVTDIKRRAASIGNELHVSVHDVEKVEKWVQVIEVCSLLASRTSNQFEDYFNDKDDYARYLKSYVDFSNVDMPSEYSALVDFSNEEQSDLYVDPKNPKVNRNIVHSKLFAADHILRDIVEPVSKDNIEEFYSQKAEIAYCKIKGKEITAEEQKAVLKYQKLKNRVELRDIVEYGEIINELLGQLINWSFMRERDLLYFQLGFHYDCLRNDSKKPEGYKNIKVDENSIKDAILYQIIGMYVNGVTVYAPEKDGDKLKEQCVKGGVGVKVSAFHRYSKYLGLNEKTLYNAGLEIFEVVAEHEDIINLRNGIDHFKYYLGDYRSMLSIYSEVFDRFFTYDIKYQKNVLNLLQNILLRHNVIVEPILESGFKTIGEQTKPGAKLSIRSIKSDTFQYKVKGGTLITDAKDERYLETIRKILYYAENEEDNLKKSVVVTNADKYEKNKESDDQNKQKEKKNKDNKGKKNEETKSDAEKNNNERLSYNPFANLNFKLSN

SEQ ID NO: 312 - protein, 1373 aa, Eubacteriaceae bacterium CHKCI004
MKISKESHKRTAVAVMEDRVGGVVYVPGGSGIDLSNNLKKRSMDTKSLYNVFNQIQAGTAPSEYEWKDYLSEAENKKREAQKMIQKANYELRRECEDYAKKANLAVSRIIFSKKPKKIFSDDDIISHMKKQRLSKFKGRMEDFVLIALRKSLVVSTYNQEVFDSRKAATVFLKNIGKKNISADDERQIKQLMALIREDYDKWNPDKDSSDKKESSGTKVIRSIEHQNMVIQPEKNKLSLSKISNVGKKTKTKQKEKAGLDAFLKEYAQIDENSRMEYLKKLRRLLDTYFAAPSSYIKGAAVSLPENINFSSELNVWERHEAAKKVNINFVEIPESLLNAEQNNNKINKVEQEHSLEQLRTDIRRRNITCYHFANALAADERYHTLFFENMAMNQFWIHHMENAVERILKKCNVGTLFKLRIGYLSEKVWKDMLNLLSIKYIALGKAVYHFALDDIWKADIWKDASDKNSGKINDLTLKGISSFDYEMVKAQEDLQREMAVGVAFSTNNLARVTCKMDDLSDAESDFLLWNKEAIRRHVKYTEKGEILSAILQFFGGRSLWDESLFEKAYSDSNYELKFLDDLKRAIYAARNETFHFKTAAIDGGSWNTRLFGSLFEKEAGLCLNVEKNKFYSNNLVLFYKQEDLRVFLDKLYGKECSRAAQIPSYNTILPRKSFSDFMKQLLGLKEPVYGSAILDQWYSACYYLFKEVYYNLFLQDSSAKALFEKAVKALKGADKKQEKAVESFRKRYWEISKNASLAEICQSYITEYNQQNNKERKVRSANDGMFNEPIYQHYKMLLKEALKMAFASYIKNDKELKFVYKPTEKLFEVSQDNFLPNWNSEKYNTLISEVKNSPDLQKWYIVGKFMNARMLNLLLGSMRSYLQYVSDIQKRAAGLGENQLHLSAENVGQVKKWIQVLEVCLLLSVRISDKFTDYFKDEEEYASYLKEYVDFEDSAMPSDYSALLAFSNEGKIDLYVDASNPKVNRNIIQAKLYAPDMVLKKVVKKISQDECKEFNEKKEQIMQFKNKGDEVSWEEQQKILEYQKLKNRVELRDLSEYGELINELLGQLINWSYLRERDLLYFQLGFHYSCLMNESKKPDAYKTIRRGTVSIENAVLYQIIAMYINGFPVYAPEKGELKPQCKTGSAGQKIRAFCQWASMVEKKKYELYNAGLELFEVVKEHDNIIDLRNKIDHFKYYQGNDSILALYGEIFDRFFTYDMKYRNNVLNHLQNILLRHNVIIKPIISKDKKEVGRGKMKDRAAFLLEEVSSDRFTYKVKEGERKIDAKNRLYLETVRDILYFPNRAVNDKGEDVIICSKKAQDLNEKKADRDKNHDKSKDTNQKKEGKNQEEKSENKEPYSDRMTWKPFAGIKLE

SEQ ID NO: 313 - protein, 1334 aa, Lachnospiraceae bacterium NK4A144
MKISKVDHTRMAVAKGNQHRRDEISGILYKDPTKTGSIDFDERFKKLNCSAKILYHVFNGIAEGSNKYKNIVDKVNNNLDRVLFTGKSYDRKSIIDIDTVLRNVEKINAFDRISTEEREQIIDDLLEIQLRKGLRKGKAGLREVLLIGAGVIVRTDKKQEIADFLEILDEDFNKTNQAKNIKLSIENQGLVVSPVSRGEERIFDVSGAQKGKSSKKAQEKEALSAFLLDYADLDKNVRFEYLRKIRRLINLYFYVKNDDVMSLTEIPAEVNLEKDFDIWRDHEQRKEENGDFVGCPDILLADRDVKKSNSKQVKIAERQLRESIREKNIKRYRFSIKTIEKDDGTYFFANKQISVFWIHRIENAVERILGSINDKKLYRLRLGYLGEKVWKDILNFLSIKYIAVGKAVFNFAMDDLQEKDRDIEPGKISENAVNGLTSFDYEQIKADEMLQREVAVNVAFAANNLARVTVDIPQNGEKEDILLWNKSDIKKYKKNSKKGILKSILQFFGGASTWNMKMFEIAYHDQPGDYEENYLYDIIQIIYSLRNKSFHFKTYDHGDKNWNRELIGKMIEHDAERVISVEREKFHSNNLPMFYKDADLKKILDLLYSDYAGRASQVPAFNTVLVRKNFPEFLRKDMGYKVHFNNPEVENQWHSAVYYLYKEIYYNLFLRDKEVKNLFYTSLKNIRSEVSDKKQKLASDDFASRCEEIEDRSLPEICQIIMTEYNAQNFGNRKVKSQRVIEKNKDIFRHYKMLLIKTLAGAFSLYLKQERFAFIGKATPIPYETTDVKNFLPEWKSGMYASFVEEIKNNLDLQEWYIVGRFLNGRMLNQLAGSLRSYIQYAEDIERRAAENRNKLFSKPDEKIEACKKAVRVLDLCIKISTRISAEFTDYFDSEDDYADYLEKYLKYQDDAIKELSGSSYAALDHFCNKDDLKFDIYVNAGQKPILQRNIVMAKLFGPDNILSEVMEKVTESAIREYYDYLKKVSGYRVRGKCSTEKEQEDLLKFQRLKNAVEFRDVTEYAEVINELLGQLISWSYLRERDLLYFQLGFHYMCLKNKSFKPAEYVDIRRNNGTIIHNAILYQIVSMYINGLDFYSCDKEGKTLKPIETGKGVGSKIGQFIKYSQYLYNDPSYKLEIYNAGLEVFENIDEHDNITDLRKYVDHFKYYAYGNKMSLLDLYSEFFDRFFTYDMKYQKNVVNVLENILLRHFVIFYPKFGSGKKDVGIRDCKKERAQIEISEQSLTSEDFMFKLDDKAGEEAKKFPARDERYLQTIAKLLYYPNEIEDMNRFMKKGETINKKVQFNRKKKITRKQKNNSSNEVLSSTMGYLFKNIKL

SEQ ID NO: 314 - protein, 500 aa, Chlorofexus aggregans S1
MTDQVRREEVAAGELADTPLAAAQTPAADAAVAATPAPAEAVAPTPEQAVDQPATTGESEAPVTTAQAAAHEAEPAEATGASFTPVSEQQPQKPRRLKDLQPGMELEGKVTSIALYGIFVDVGVGRDGLVHISEMSDRRIDTPSELVQIGDTVKVWVKSVDLDARRISLTMLNPSRGEKPRRSRQSQPAQPQPRRQEVDREKLASLKVGEIVEGVITGFAPFGAFADIGVGKDGLIHISELSEGRVEKPEDAVKVGERYQFKVLEIDGEGTRISLSLRRAQRTQRMQQLEPGQIIEGTVSGIATFGAFVDIGVGRDGLVHISALAPHRVAKVEDVVKVGDKVKVKVLGVDPQSKRISLTMRLEEEQPATTAGDEAAEPAEEVTPTRRGNLERFAAAAQTARERSERGERSERGERRERRERRPAQSSPDTYIVGEDDDESFEGNATIEDLLTKFGGSSSRRDRDRRRRHEDDDDEEMERPSNRRQREAIRRTLQQIGYDE

SEQ ID NO: 315 - protein, 249 aa, Demequina aurantiaca
MDLTWHALLILFIVALLAGFLDTLAGGGGLLTVPALLLTGIPPLQALGTNKLQSSFGTGMATYQVIRKKRVHWRDVRWPMVWAFLGSAAGAVAVQFIDTDALLIIIPVVLALVAAYFLFVPKSHLPPPEPRMSDPAYEATLVPIIGAYDGAFGPGTGSLYALSGVALRAKTLVQSTAIAKTLNFATNFAALLVFAFAGHMLWTVGAVMIAGQLIGAYAGSHMLFRVNPLVLRVLIVVMSLGMLIRVLLD

SEQ ID NO: 316 - protein, 1235 aa, Thalassospira sp. TSL5-1
MRIIKPYGRSHVEGVATQEPRRKLRLNSSPDISRDIPGFAQSHDALIIAQWISAIDKIATKPKPDKKPTQAQINLRTTLGDAAWQHVMAENLLPAATDPAIREKLHLIWQSKIAPWGTARPQAEKDGKPTPKGGWYERFCGVLSPEAITQNVARQIAKDIYDHLHVAAKRKGREPAKQGESSNKPGKFKPDRKRGLIEERAESIAKNALRPGSHAPCPWGPDDQATYEQAGDVAGQIYAAARDCLEEKKRRSGNRNTSSVQYLPRDLAAKILYAQYGRVFGPDTTIKAALDEQPSLFALHKAIKDCYHRLINDARKRDILRILPRNMAALFRLVRAQYDNRDINALIRLGKVIHYHASEQGKSEHHGIRDYWPSQQDIQNSRFWGSDGQADIKRHEAFSRIWRHIIALASRTLHDWADPHSQKFSGENDDILLLAKDAIEDDVFKAGHYERKCDVLFGAQASLFCGAEDFEKAILKQAITGTGNLRNATFHFKGKVRFEKELQELTKDVPVEVQSAIAALWQKDAEGRTRQIAETLQAVLAGHFLTEEQNRHIFAALTAAMAQPGDVPLPRLRRVLARHDSICQRGRILPLSPCPDRAKLEESPALTCQYTVLKMLYDGPFRAWLAQQNSTILNHYIDSTIARTDKAARDMNGRKLAQAEKDLITSRAADLPRLSVDEKMGDFLARLTAATATEMRVQRGYQSDGENAQKQAAFIGQFECDVIGRAFADFLNQSGFDFVLKLKADTPQPDAAQCDVTALIAPDDISVSPPQAWQQVLYFILHLVPVDDASHLLHQIRKWQVLEGKEKPAQIAHDVQSVLMLYLDMHDAKFTGGAALHGIEKFAEFFAHAADFRAVFPPQSLQDQDRSIPRRGLREIVRFGHLPLLQHMSGTVQITHDNVVAWQAARTAGATGMSPIARRQKQREELHALAVERTARFRNADLQNYMHALVDVIKHRQLSAQVTLSDQVRLHRLMMGVLGRLVDYAGLWERDLYFVVLALLYHHGATPDDVFKGQGKKNLADGQVVAALKPKNRKAAAPVGVFDDLDHYGIYQDDRQSIRNGLSHFNMLRGGKAPDLSHWVNQTRSLVAHDRKLKNAVAKSVIEMLAREGFDLDWGIQTDRGQHILSHGKIRTRQAQHFQKSRLHIVKKSAKPDKNDTVKIRENLHGDAMVERVVQLFAAQVQKRYDITVEKRLDHLFLKPQDQKGKNGIHTHNGWSKTEKKRRPSRENRKGNHEN

SEQ ID NO: 317 - protein, 1312 aa, Pseudobutyrivibrio sp. OR37
MKFSKESHRKTAVGVTESNGIIGLLYKDPLNEKEKIEDVVNQRANSTKRLFNLFGTEATSKDISRASKDLAKVVNKAIGNLKGNKKFNKKEQITKGLNTKIIVEELKNVLKDEKKLIVNKDIIDEACSRLLKTSFRTAKTKQAVKMILTAVLIENTNLSKEDEAFVHEYFVKKLVNEYNKTSVKKQIPVALSNQNMVIQPNSVNGTLEISETKKSKETKTTEKDAFRAFLRDYATLDENRRHKMRLCLRNLVNLYFYGETSVSKDDFDEWRDHEDKKQNDELFVKKIVSIKTDRKGNVKEVLDVDATIDAIRTNNIACYRRALAYANENPDVFFSDTMLNKFWIHHVENEVERIYGHINNNTGDYKYQLGYLSEKVWKGIINYLSIKYIAEGKAVYNYAMNALAKDNNSNAFGKLDEKFVNGITSFEYERIKAEETLQRECAVNIAFAANHLANATVDLNEKDSDFLLLKHEDNKDTLGAVARPNILRNILQFFGGKSRWNDFDFSGIDEIQLLDDLRKMIYSLRNSSFHFKTENIDNDSWNTKLIGDMFAYDFNMAGNVQKDKMYSNNVPMFYSTSDIEKMLDRLYAEVHERASQVPSFNSVFVRKNFPDYLKNDLKITSAFGVDDALKWQSAVYYVCKEIYYNDFLQNPETFTMLKDYVQCLPIDIDKSMDQKLKSERNAHKNFKEAFATYCKECDSLSAICQMIMTEYNNQNKGNRKVISARTKDGDKLIYKHYKMILFEALKNVFTIYLEKNINTYGFLKKPKLINNVPAIEEFLPNYNGRQYETLVNRITEETELQKWYIVGRLLNPKQVNQLIGNFRSYVQYVNDVARRAKQTGNNLSNDNIAWDVKNIIQIFDVCTKLNGVTSNILEDYFDDGDDYARYLKNFVDYTNKNNDHSATLLGDFCAKEIDGIKIGIYHDGTNPIVNRNIIQCKLYGATGIISDLTKDGSILSVDYEIIKKYMQMQKEIKVYQQKGICKTKEEQQNLKKYQELKNIVELRNIIDYSEILDELQGQLINWGYLRERDLMYFQLGFHYLCLHNESKKPVGYNNAGDISGAVLYQIVAMYTNGLSLIDANGKSKKNAKASAGAKVGSFCSYSKEIRGVDKDTKEDDDPIYLAGVELFENINEHQQCINLRNYIEHFHYYAKHDRSMLDLYSEVFDRFFTYDMKYTKNVPNMMYNILLQHLVVPAFEFGSSEKRLDDNDEQTKPRAMFTLREKNGLSSEQFTYRLGDGNSTVKLSARGDDYLRAVASLLYYPDRAPEGLIRDAEAEDKFAKINHSNPKSDNRNNRGNFKNPKVQWYNNKTKRK

SEQ ID NO: 318 - protein, 1343 aa, Butyrivibrio sp. YAB3001
MKISKVDHRKTAVKITDNKGAEGFIYQDPTRDSSTMEQIISNRARSSKVLFNIFGDTKKSKDLNKYTESLIIYVNKAIKSLKGDKRNNKYEEITESLKTERVLNALIQAGNEFTCSENNIEDALNKYLKKSFRVGNTKSALKKLLMAAYCGYKLSIEEKEEIQNYFVDKLVKEYNKDTVLKYTAKSLKHQNMVVQPDTDNHVFLPSRIAGATQNKMSEKEALTEFLKAYAVLDEEKRHNLRIILRKLVNLYFYESPDFIYPENNEWKEHDDRKNKTETFVSPVKVNEEKNGKTFVKIDVPATKDLIRLKNIECYRRSVAETAGNPITYFTDHNISKFWIHHIENEVEKIFALLKSNWKDYQFSVGYISEKVWKEIINYLSIKYIAIGKAVYNYALEDIKKNDGTLNFGVIDPSFYDGINSFEYEKIKAEETFQREVAVYVSFAVNHLSSATVKLSEAQSDMLVLNKNDIEKIAYGNTKRNILQFFGGQSKWKEFDFDRYINPVNYTDIDFLFDIKKMVYSLRNESFHFTTTDTESDWNKNLISAMFEYECRRISTVQKNKFFSNNLPLFYGENSLERVLHKLYDDYVDRMSQVPSFGNVFVRKKFPDYMKEIGIKHNLSSEDNLKLQGALYFLYKEIYYNAFISSEKAMKIFVDLVNKLDTNARDDKGRITHEAMAHKNFKDAISHYMTHDCSLADICQKIMTEYNQQNTGHRKKQTTYSSEKNPEIFRHYKMILFMLLQKAMTEYISSEEIFDFIMKPNSPKTDIKEEEFLPQYKSCAYDNLIKLIADNVELQKWYITARLLSPREVNQLIGSFRSYKQFVSDIERRAKETNNSLSKSGMTVDVENITKVLDLCTKLNGRFSNELTDYFDSKDDYAVYVSKFLDFGFKIDEKFPAALLGEFCNKEENGKKIGIYHNGTEPILNSNIIKSKLYGITDVVSRAVKPVSEKLIREYLQQEVKIKPYLENGVCKNKEEQAALRKYQELKNRIEFRDIVEYSEIINELMGQLINFSYLRERDLMYFQLGFHYLCLNNYGAKPEGYYSIVNDKRTIKGAILYQIVAMYTYGLPIYHYVDGTISDRRKNKKTVLDTLNSSETVGAKIKYFIYYSDELFNDSLILYNAGLELFENINEHENIVNLRKYIDHFKYYVSQDRSLLDIYSEVFDRYFTYDRKYKKNVMNLFSNIMLKHFIITDFEFSTGEKTIGEKNTAKKECAKVRIKRGGLSSDKFTYKFKDAKPIELSAKNTEFLDGVARILYYPENVVLTDLVRNSEVEDEKRIEKYDRNHNSSPTRKDKTYKQDVKKNYNKKTSKAFDSSKLDTKSVGNNLSDNPVLKQFLSESKKKR

SEQ ID NO: 319 - protein, 1276 aa, Blautia sp Marseille-P2398
MKISKVDHVKSGIDQKLSSQRGMLYKQPQKKYEGKQLEEHVRNLSRKAKALYQVFPVSGNSKMEKELQIINSFIKNILLRLDSGKTSEEIVGYINTYSVASQISGDHIQELVDQHLKESLRKYTCVGDKRIYVPDIIVALLKSKFNSETLQYDNSELKILIDFIREDYLKEKQIKQIVHSIENNSTPLRIAEINGQKRLIPANVDNPKKSYIFEFLKEYAQSDPKGQESLLQHMRYLILLYLYGPDKITDDYCEEIEAWNFGSIVMDNEQLFSEEASMLIQDRIYVNQQIEEGRQSKDTAKVKKNKSKYRMLGDKIEHSINESVVKHYQEACKAVEEKDIPWIKYISDHVMSVYSSKNRVDLDKLSLPYLAKNTWNTWISFIAMKYVDMGKGVYHFAMSDVDKVGKQDNLIIGQIDPKFSDGISSFDYERIKAEDDLHRSMSGYIAFAVNNFARAICSDEFRKKNRKEDVLTVGLDEIPLYDNVKRKLLQYFGGASNWDDSIIDIIDDKDLVACIKENLYVARNVNFHFAGSEKVQKKQDDILEEIVRKETRDIGKHYRKVFYSNNVAVFYCDEDIIKLMNHLYQREKPYQAQIPSYNKVISKTYLPDLIFMLLKGKNRTKISDPSIMNMFRGTFYFLLKEIYYNDFLQASNLKEMFCEGLKNNVKNKKSEKPYQNFMRRFEELENMGMDFGEICQQIMTDYEQQNKQKKKTATAVMSEKDKKIRTLDNDTQKYKHFRTLLYIGLREAFIIYLKDEKNKEWYEFLREPVKREQPEEKEFVNKWKLNQYSDCSELILKDSLAAAWYVVAHFINQAQLNHLIGDIKNYIQFISDIDRRAKSTGNPVSESTEIQIERYRKILRVLEFAKFFCGQITNVLTDYYQDENDFSTHVGHYVKFEKKNMEPAHALQAFSNSLYACGKEKKKAGFYYDGMNPIVNRNITLASMYGNKKLLENAMNPVTEQDIRKYYSLMAELDSVLKNGAVCKSEDEQKNLRHFQNLKNRIELVDVLTLSELVNDLVAQLIGWVYIRERDMMYLQLGLHYIKLYFTDSVAEDSYLRTLDLEEGSIADGAVLYQIASLYSFNLPMYVKPNKSSVYCKKHVNSVATKFDIFEKEYCNGDETVIENGLRLFENINLHKDMVKFRDYLAHFKYFAKLDESILELYSKAYDFFFSYNIKLKKSVSYVLTNVLLSYFINAKLSFSTYKSSGNKTVQHRTTKISVVAQTDYFTYKLRSIVKNKNGVESIENDDRRCEVVNIAARDKEFVDEVCNVINYNSDK

SEQ ID NO: 320 - protein, 1168 aa, Leptotrichia sp. Marseille-P300
MKITKIDGISHKKYIKEGKLVKSTSEENKTDERLSELLTIRLDTYIKNPDNASEEENRIRRENLKEFFSNKVLYLKDGILYLKDRREKNQLQNKNYSEEDISEYDLKNKNNFLVLKKILLNEDINSEELEIFRNDFEKKLDKINSLKYSLEENKANYQKINENNIKKVEGKSKRNIFYNYYKDSAKRNDYINNIQEAFDKLYKKEDIENLFFLIENSKKHEKYKIRECYHKIIGRKNDKENFATIIYEEIQNVNNMKELIEKVPNVSELKKSQVFYKYYLNKEKLNDENIKYVFCHFVEIEMSKLLKNYVYKKPSNISNDKVKRIFEYQSLKKLIENKLLNKLDTYVRNCGKYSFYLQDGEIATSDFIVGNRQNEAFLRNIIGVSSTAYFSLRNILETENENDITGRMRGKTVKNNKGEEKYISGEIDKLYDNNKQNEVKKNLKMFYSYDFNMNSKKEIEDFFSNIDEAISSIRHGIVHFNLELEGKDIFTFKNIVPSQISKKMFHDEINEKKLKLKIFKQLNSANVFRYLEKYKILNYLNRTRFEFVNKNIPFVPSFTKLYSRIDDLKNSLGIYWKTPKTNDDNKTKEITDAQIYLLKNIYYGEFLNYFMSNNGNFFEITKEIIELNKNDKRNLKTGFYKLQKFENLQEKTPKEYLANIQSLYMINAGNQDEEEKDTYIDFIQKIFLKGFMTYLANNGRLSLIYIGSDEETNTSLAEKKQEFDKFLKKYEQNNNIEIPYEINEFVREIKLGKILKYTERLNMFYLILKLLNHKELTNLKGSLEKYQSANKEEAFSDQLELINLLNLDNNRVTEDFELEADEIGKFLDFNGNKVKDNKELKKFDTNKIYFDGENIIKHRAFYNIKKYGMLNLLEKISDEAKYKISIEELKNYSKKKNEIEENHTTQENLHRKYARPRKDEKFTDEDYKKYEKAIRNIQQYTHLKNKVEFNELNLLQSLLLRILHRLVGYTSIWERDLRFRLKGEFPENQYIEEIFNFDNSKNVKYKNGQIVEKYINFYKELYKDDTEKISIYSDKKVKELKKEKKDLYIRNYIAHFNYIPNAEISLLEMLENLRKLLSYDRKLKNAIMKSIVDILKEYGFVVTFKIEKDKKIRIESLKSEEVVHLKKLKLKDNDKKKEPIKTYRNSKELCKLVKVMFEYKMKEKKSEN

SEQ ID NO: 321 - protein, 1138 aa, Bacterioides ihuae
MRITKVKVKESSDQKDKMVLIHRKVGEGTLVLDENLADLTAPIIDKYKDKSFELSLLKQTLVSEKEMNIPKCDKCTAKERCLSCKQREKRLKEVRGAIEKTIGAVIAGRDIIPRLNIFNEDEICWLIKPKLRNEFTFKDVNKQVVKLNLPKVLVEYSKKNDPTLFLAYQQWIAAYLKNKKGHIKKSILNNRVVIDYSDESKLSKRKQALELWGEEYETNQRIALESYHTSYNIGELVTLLPNPEEYVSDKGEIRPAFHYKLKNVLQMHQSTVFGTNEILCINPIFNENRANIQLSAYNLEVVKYFEHYFPIKKKKKNLSLNQAIYYLKVETLKERLSLQLENALRMNLLQKGKIKKHEFDKNTCSNTLSQIKRDEFFVLNLVEMCAFAANNIRNIVDKEQVNEILSKKDLCNSLSKNTIDKELCTKFYGADFSQIPVAIWAMRGSVQQIRNEIVHYKAEAIDKIFALKTFEYDDMEKDYSDTPFKQYLELSIEKIDSFFIEQLSSNDVLNYYCTEDVNKLLNKCKLSLRRTSIPFAPGFKTIYELGCHLQDSSNTYRIGHYLMLIGGRVANSTVTKASKAYPAYRFMLKLIYNHLFLNKFLDNHNKRFFMKAVAFVLKDNRENARNKFQYAFKEIRMMNNDESIASYMSYIHSLSVQEQEKKGDKNDKVRYNTEKFIEKVFVKGFDDFLSWLGVEFILSPNQEERDKTVTREEYENLMIKDRVEHSINSNQESHIAFFTFCKLLDANHLSDLRNEWIKFRSSGDKEGFSYNFAIDIIELCLLTVDRVEQRRDGYKEQTELKEYLSFFIKGNESENTVWKGFYFQQDNYTPVLYSPIELIRKYGTLELLKLIIVDEDKITQGEFEEWQTLKKVVEDKVTRRNELHQEWEDMKNKSSFSQEKCSIYQKLCRDIDRYNWLDNKLHLVHLRKLHNLVIQILSRMARFIALWDRDFVLLDASRANDDYKLLSFFNFRDFINAKKTKTDDELLAEFGSKIEKKNAPFIKAEDVPLMVECIEAKRSFYQKVFFRNNLQVLADRNFIAHYNYISKTAKCSLFEMIIKLRTLMYYDRKLRNAVVKSIANVFDQNGMVLQLSLDDSHELKVDKVISKRIVHLKNNNIMTDQVPEEYYKICRRLLEMKK

SEQ ID NO: 322 - protein, 697 aa, Porphyromonadaceae bacterium KH3CP3RA
MEFRDSIFKSLLQKEIEKAPLCFAEKLISGGVFSYYPSERLKEFVGNHPFSLFRKTMPFSPGFKRVMKSGGNYQNANRDGRFYDLDIGVYLPKDGFGDEEWNARYFLMKLIYNQLFLPYFADAENHLFRECVDFVKRVNRDYNCKNNNSEEQAFIDIRSMREDESIADYLAFIQSNIIIEENKKKETNKEGQINFNKFLLQVFVKGFDSFLKDRTELNFLQLPELQGDGTRGDDLESLDKLGAVVAVDLKLDATGIDADLNENISFYTFCKLLDSNHLSRLRNEIIKYQSANSDFSHNEDFDYDRIISIIELCMLSADHVSTNDNESIFPNNDKDFSGIRPYLSTDAKVETFEDLYVHSDAKTPITNATMVLNWKYGTDKLFERLMISDQDFLVTEKDYFVWKELKKDIEEKIKLREELHSLWVNTPKGKKGAKKKNGRETTGEFSEENKKEYLEVCREIDRYVNLDNKLHFVHLKRMHSLLIELLGRFVGFTYLFERDYQYYHLEIRSRRNKDAGVVDKLEYNKIKDQNKYDKDDFFACTFLYEKANKVRNFIAHFNYLTMWNSPQEEEHNSNLSGAKNSSGRQNLKCSLTELINELREVMSYDRKLKNAVTKAVIDLFDKHGMVIKFRIVNNNNNDNKNKHHLELDDIVPKKIMHLRGIKLKRQDGKPIPIQTDSVDPLYCRMWKKLLDLKPTPF

SEQ ID NO: 323 - protein, 204 aa, Listeria riparia
MHDAWAENPKKPQSDAFLKEYKACCEAIDTYNWHKNKATLVYVNELHHLLIDILGRLVGYVAIADRDFQCMANQYLKSSGHTERVDSWINTIRKNRPDYIEKLDIFMNKAGLFVSEKNGRNYIAHLNYLSPKHKYSLLYLFEKLREMLKYDRKLKNAVTKSLIDLLDKHGMCVVFANLKNNKHRLVIASLKPKKIETFKWKKIK

SEQ ID NO: 324 - protein, 1082 aa, Insolitispirillum peregrinum
MRIIRPYGSSTVASPSPQDAQPLRSLQRQNGTFDVAEFSRRHPELVLAQWVAMLDKIIRKPAPGKNSTALPRPTAEQRRLRQQVGAALWAEMQRHTPVPPELKAVWDSKVHPYSKDNAPATAKTPSHRGRWYDRFGDPETSAATVAEGVRRHLLDSAQPFRANGGQPKGKGVIEHRALTIQNGTLLHHHQSEKAGPLPEDWSTYRADELVSTIGKDARWIKVAASLYQHYGRIFGPTTPISEAQTRPEFVLHTAVKAYYRRLFKERKLPAERLERLLPRTGEALRHAVTVQHGNRSLADAVRIGKILHYGWLQNGEPDPWPDDAALYSSRYWGSDGQTDIKHSEAVSRVWRRALTAAQRTLTSWLYPAGTDAGDILLIGQKPDSIDRNRLPLLYGDSTRHWTRSPGDVWLFLKQTLENLRNSSFHFKTLSAFTSHLDGTCESEPAEQQAAQALWQDDRQQDHQQVFLSLRALDATTYLPTGPLHRIVNAVQSTDATLPLPRFRRVVTRAANTRLKGFPVEPVNRRTMEDDPLLRCRYGVLKLLYERGFRAWLETRPSIASCLDQSLKRSTKAAQTINGKNSPQGVEILSRATKLLQAEGGGGHGIHDLFDRLYAATAREMRVQVGYHHDAEAARQQAEFIEDLKCEVVARAFCAYLKTLGIQGDTFRRQPEPLPTWPDLPDLPSSTIGTAQAALYSVLHLMPVEDVGSLLHQLRRWLVALQARGGEDGTAITATIPLLELYLNRHDAKFSGGGAGTGLRWDDWQVFFDCQATFDRVFPPGPALDSHRLPLRGLREVLRFGRVNDLAALIGQDKITAAEVDRWHTAEQTIAAQQQRREALHEQLSRKKGTDAEVDEYRALVTAIADHRHLTAHVTLSNVVRLHRLMTTVLGRLVDYGGLWERDLTFVTLYEAHRLGGLRNLLSESRVNKFLDGQTPAALSKKNNAEENGMISKVLGDKARRQIRNDFAHFNMLQQGKKTINLTDEINNARKLMAHDRKLKNAITRSVTTLLQQDGLDIVWTMDASHRLTDAKIDSRNAIHLHKTHNRANIREPLHGKSYCRWVAALFGATSTPSATKKSDKIR

SEQ ID NO: 325 - protein, 1001 aa, Artificial Sequence
  Consensus Sequence
  misc_feature (7)..(9): Xaa can be any naturally occurring amino acid
  misc_feature (11)..(11): Xaa can be any naturally occurring amino acid
  misc_feature (14)..(16): Xaa can be any naturally occurring amino acid
  misc_feature (20)..(20): Xaa can be any naturally occurring amino acid
  misc_feature (22)..(22): Xaa can be any naturally occurring amino acid
  misc_feature (29)..(29): Xaa can be any naturally occurring amino acid
  misc_feature (36)..(36): Xaa can be any naturally occurring amino acid
  misc_feature (42)..(43): Xaa can be any naturally occurring amino acid
  misc_feature (48)..(48): Xaa can be any naturally occurring amino acid
  misc_feature (52)..(53): Xaa can be any naturally occurring amino acid
  misc_feature (57)..(57): Xaa can be any naturally occurring amino acid
  misc_feature (59)..(59): Xaa can be any naturally occurring amino acid
  misc_feature (69)..(71): Xaa can be any naturally occurring amino acid
  misc_feature (73)..(73): Xaa can be any naturally occurring amino acid
  misc_feature (75)..(75): Xaa can be any naturally occurring amino acid
  misc_feature (78)..(79): Xaa can be any naturally occurring amino acid
  misc_feature (86)..(86): Xaa can be any naturally occurring amino acid
  misc_feature (89)..(89): Xaa can be any naturally occurring amino acid
  MISC_FEATURE (90)..(90): "Xaa" at position 90 is Amino Acid code "J" - Leu or Ile
  misc_feature (101)..(101): Xaa can be any naturally occurring amino acid
  misc_feature (104)..(104): Xaa can be any naturally occurring amino acid
  misc_feature (111)..(111): Xaa can be any naturally occurring amino acid
  misc_feature (116)..(116): Xaa can be any naturally occurring amino acid
  misc_feature (121)..(121): Xaa can be any naturally occurring amino acid
  misc_feature (128)..(130): Xaa can be any naturally occurring amino acid
  misc_feature (133)..(133): Xaa can be any naturally occurring amino acid
  misc_feature (145)..(145): Xaa can be any naturally occurring amino acid
  misc_feature (148)..(148): Xaa can be any naturally occurring amino acid
  misc_feature (167)..(167): Xaa can be any naturally occurring amino acid
  misc_feature (174)..(174): Xaa can be any naturally occurring amino acid
  misc_feature (192)..(192): Xaa can be any naturally occurring amino acid
  misc_feature (194)..(195): Xaa can be any naturally occurring amino acid
  misc_feature (199)..(199): Xaa can be any naturally occurring amino acid
  misc_feature (202)..(203): Xaa can be any naturally occurring amino acid
  misc_feature (206)..(206): Xaa can be any naturally occurring amino acid
  misc_feature (217)..(219): Xaa can be any naturally occurring amino acid
  misc_feature (228)..(228): Xaa can be any naturally occurring amino acid
  misc_feature (233)..(233): Xaa can be any naturally occurring amino acid
  MISC_FEATURE (236)..(236): "Xaa" at position 90 is Amino Acid code "J" - Leu or Ile
  misc_feature (243)..(243): Xaa can be any naturally occurring amino acid
  misc_feature (245)..(245): Xaa can be any naturally occurring amino acid
  misc_feature (262)..(262): Xaa can be any naturally occurring amino acid
  MISC_FEATURE (267)..(267): "Xaa" at position 90 is Amino Acid code "J" - Leu or Ile
  misc_feature (277)..(278): Xaa can be any naturally occurring amino acid
  misc_feature (282)..(282): Xaa can be any naturally occurring amino acid
  misc_feature (287)..(287): Xaa can be any naturally occurring amino acid
  misc_feature (307)..(307): Xaa can be any naturally occurring amino acid
  misc_feature (314)..(314): Xaa can be any naturally occurring amino acid
  misc_feature (320)..(321): Xaa can be any naturally occurring amino acid
  misc_feature (333)..(333): Xaa can be any naturally occurring amino acid
  misc_feature (343)..(343): Xaa can be any naturally occurring amino acid
  misc_feature (357)..(357): Xaa can be any naturally occurring amino acid
  misc_feature (367)..(367): Xaa can be any naturally occurring amino acid
  misc_feature (371)..(371): Xaa can be any naturally occurring amino acid
  misc_feature (374)..(375): Xaa can be any naturally occurring amino acid
  misc_feature (378)..(378): Xaa can be any naturally occurring amino acid
  misc_feature (392)..(392): Xaa can be any naturally occurring amino acid
  misc_feature (402)..(402): Xaa can be any naturally occurring amino acid
  misc_feature (414)..(415): Xaa can be any naturally occurring amino acid
  MISC_FEATURE (418)..(418): "Xaa" at position 90 is Amino Acid code "J" - Leu or Ile
  misc_feature (446)..(446): Xaa can be any naturally occurring amino acid
  misc_feature (448)..(449): Xaa can be any naturally occurring amino acid
  misc_feature (451)..(451): Xaa can be any naturally occurring amino acid
  misc_feature (467)..(467): Xaa can be any naturally occurring amino acid
  misc_feature (489)..(489): Xaa can be any naturally occurring amino acid
  misc_feature (500)..(500): Xaa can be any naturally occurring amino acid
  misc_feature (510)..(510): Xaa can be any naturally occurring amino acid
  misc_feature (514)..(514): Xaa can be any naturally occurring amino acid
  misc_feature (528)..(529): Xaa can be any naturally occurring amino acid
  misc_feature (532)..(532): Xaa can be any naturally occurring amino acid
  misc_feature (539)..(539): Xaa can be any naturally occurring amino acid
  misc_feature (547)..(548): Xaa can be any naturally occurring amino acid
  misc_feature (551)..(551): Xaa can be any naturally occurring amino acid
  misc_feature (553)..(554): Xaa can be any naturally occurring amino acid
  misc_feature (565)..(565): Xaa can be any naturally occurring amino acid
  misc_feature (576)..(576): Xaa can be any naturally occurring amino acid
  misc_feature (587)..(588): Xaa can be any naturally occurring amino acid
  misc_feature (600)..(600): Xaa can be any naturally occurring amino acid
  misc_feature (604)..(605): Xaa can be any naturally occurring amino acid
  misc_feature (622)..(622): Xaa can be any naturally occurring amino acid
  misc_feature (627)..(627): Xaa can be any naturally occurring amino acid
  misc_feature (629)..(629): Xaa can be any naturally occurring amino acid
  misc_feature (655)..(655): Xaa can be any naturally occurring amino acid
  misc_feature (662)..(662): Xaa can be any naturally occurring amino acid
  misc_feature (682)..(682): Xaa can be any naturally occurring amino acid
  misc_feature (686)..(686): Xaa can be any naturally occurring amino acid
  MISC_FEATURE (688)..(688): "Xaa" at position 90 is Amino Acid code "J" - Leu or Ile
  misc_feature (691)..(691): Xaa can be any naturally occurring amino acid
  misc_feature (698)..(698): Xaa can be any naturally occurring amino acid
  misc_feature (706)..(706): Xaa can be any naturally occurring amino acid
  misc_feature (723)..(723): Xaa can be any naturally occurring amino acid
  MISC_FEATURE (737)..(737): "Xaa" at position 90 is Amino Acid code "J" - Leu or Ile
  misc_feature (738)..(738): Xaa can be any naturally occurring amino acid
  misc_feature (760)..(761): Xaa can be any naturally occurring amino acid
  misc_feature (771)..(771): Xaa can be any naturally occurring amino acid
  misc_feature (773)..(773): Xaa can be any naturally occurring amino acid
  misc_feature (779)..(779): Xaa can be any naturally occurring amino acid
  misc_feature (786)..(786): Xaa can be any naturally occurring amino acid
  misc_feature (790)..(790): Xaa can be any naturally occurring amino acid
  misc_feature (798)..(798): Xaa can be any naturally occurring amino acid
  misc_feature (800)..(800): Xaa can be any naturally occurring amino acid
  misc_feature (834)..(834): Xaa can be any naturally occurring amino acid
  misc_feature (843)..(843): Xaa can be any naturally occurring amino acid
  misc_feature (851)..(852): Xaa can be any naturally occurring amino acid
  misc_feature (866)..(866): Xaa can be any naturally occurring amino acid
  misc_feature (870)..(870): Xaa can be any naturally occurring amino acid
  misc_feature (873)..(873): Xaa can be any naturally occurring amino acid
  misc_feature (877)..(877): Xaa can be any naturally occurring amino acid
  misc_feature (889)..(889): Xaa can be any naturally occurring amino acid
  misc_feature (896)..(896): Xaa can be any naturally occurring amino acid
  misc_feature (916)..(916): Xaa can be any naturally occurring amino acid
  misc_feature (923)..(923): Xaa can be any naturally occurring amino acid
  misc_feature (936)..(936): Xaa can be any naturally occurring amino acid
  misc_feature (962)..(962): Xaa can be any naturally occurring amino acid
  misc_feature (966)..(966): Xaa can be any naturally occurring amino acid
  misc_feature (970)..(970): Xaa can be any naturally occurring amino acid
  misc_feature (985)..(985): Xaa can be any naturally occurring amino acid
  misc_feature (996)..(996): Xaa can be any naturally occurring amino acid
MKISKVXXXVXKKXXXGKLXKXVNERNRXAKRLSNXLBKYIXXIDKIXKKEXXKKFXAXEEITLKLNQXXXBXLXKAXXDLRKDNXYSXXKKILHNEDINXEEXELLINDXLEKLXKIESXKYSYQKXXXNYXMSVQEHSKKSIXRIXESAKRNKEALDKFLKEYAXLDPRMEXLAKLRKLLELYFYFKNDXIXXEEEXNVXXHKXLKENHPDFVEXXXNKENAELNXYAIEXKKXLKYYFPXKXAKNSNDKIFEKQELKKXWIHQXENAVERILLXXGKVXYKLQXGYLAELWKIRINEIFIKYIXVGKAVAXFALRNXXKBENDILGGKIXKKLNGITSFXYEKIKAEEILQREXAVEVAFAANXLYAXDLXXIRXSILQFFGGASNWDXFLFFHFATSXISDKKWNAELIXXKKXGLVIREKLYSNNVAMFYSKDDLEKLLNXLXXFXLRASQVPSFKKVYVRXBFPQNLLKKFNDEKDDEAYSAXYYLLKEIYYNXFLPYFSANNXFFFXVKNLVLKANKDKFXXAFXDIREMNXGSPIEYLXXTQXNXXNEGRKKEEKEXDFIKFLLQIFXKGFDDYLKNNXXFILKFIPEPTEXIEIXXELQAWYIVGKFLNARKXNLLGXFXSYLKLLDDIELRALRNENIKYQSSNXEKEVLEXCLELIGLLSLDLNDYFBDEXDFAXYXGKXLDFEKKXMKDLAELXPYDQNDGENPIVNRNIXLAKKYGTLNLLEKXXDKVSEKEIKEYYELKKEIEEYXXKGEELHEEWXQXKNRVEXRDILEYXEELXGQIINYNXLXNKVLLYFQLGLHYLLLDILGRLVGYTGIWERDAXLYQIAAMYXNGLPEYIXXKKNDKYKDGQIVGXKINXFKXDKKXLYNAGLELFENXNEHKNIXIRNYIAHFNYLSKAESSLLXYSENLRXLFSYDRKLKNAVXKSLINILLRHGMVLKFKFGTDKKSVXIRSXKKIXHLKSIAKKLYYPEVXVSKEYCKLVKXLLKYK

SEQ ID NO: 326 - protein, 1224 aa, Bergeyella zoohelcum
MENKTSLGNNIYYNPFKPQDKSYFAGYFNAAMENTDSVFRELGKRLKGKEYTSENFFDAIFKENISLVEYERYVKLLSDYFPMARLLDKKEVPIKERKENFKKNFKGIIKAVRDLRNFYTHKEHGEVEITDEIFGVLDEMLKSTVLTVKKKKVKTDKTKEILKKSIEKQLDILCQKKLEYLRDTARKIEEKRRNQRERGEKELVAPFKYSDKRDDLIAAIYNDAFDVYIDKKKDSLKESSKAKYNTKSDPQQEEGDLKIPISKNGVVFLLSLFLTKQEIHAFKSKIAGFKATVIDEATVSEATVSHGKNSICFMATHEIFSHLAYKKLKRKVRTAEINYGEAENAEQLSVYAKETLMMQMLDELSKVPDVVYQNLSEDVQKTFIEDWNEYLKENNGDVGTMEEEQVIHPVIRKRYEDKFNYFAIRFLDEFAQFPTLRFQVHLGNYLHDSRPKENLISDRRIKEKITVFGRLSELEHKKALFIKNTETNEDREHYWEIFPNPNYDFPKENISVNDKDFPIAGSILDREKQPVAGKIGIKVKLLNQQYVSEVDKAVKAHQLKQRKASKPSIQNIIEEIVPINESNPKEAIVFGGQPTAYLSMNDIHSILYEFFDKWEKKKEKLEKKGEKELRKEIGKELEKKIVGKIQAQIQQIIDKDTNAKILKPYQDGNSTAIDKEKLIKDLKQEQNILQKLKDEQTVREKEYNDFIAYQDKNREINKVRDRNHKQYLKDNLKRKYPEAPARKEVLYYREKGKVAVWLANDIKRFMPTDFKNEWKGEQHSLLQKSLAYYEQCKEELKNLLPEKVFQHLPFKLGGYFQQKYLYQFYTCYLDKRLEYISGLVQQAENFKSENKVFKKVENECFKFLKKQNYTHKELDARVQSILGYPIFLERGFMDEKPTIIKGKTFKGNEALFADWFRYYKEYQNFQTFYDTENYPLVELEKKQADRKRKTKIYQQKKNDVFTLLMAKHIFKSVFKQDSIDQFSLEDLYQSREERLGNQERARQTGERNTNYIWNKTVDLKLCDGKITVENVKLKNVGDFIKYEYDQRVQAFLKYEENIEWQAFLIKESKEEENYPYVVEREIEQYEKVRREELLKEVHLIEEYILEKVKDKEILKKGDNQNFKYYILNGLLKQLKNEDVESYKVFNLNTEPEDVNINQLKQEATDLEQKAFVLTYIRNKFAHNQLPKKEFWDYCQEKYGKIEKEKTYAEYFAEVFKKEKEALIK

SEQ ID NO: 327 - protein, 1126 aa, Prevotella intermedia
MEDDKKTTDSIRYELKDKHFWAAFLNLARHNVYITVNHINKILEEGEINRDGYETTLKNTWNEIKDINKKDRLSKLIIKHFPFLEAATYRLNPTDTTKQKEEKQAEAQSLESLRKSFFVFIYKLRDLRNHYSHYKHSKSLERPKFEEGLLEKMYNIFNASIRLVKEDYQYNKDINPDEDFKHLDRTEEEFNYYFTKDNEGNITESGLLFFVSLFLEKKDAIWMQQKLRGFKDNRENKKKMTNEVFCRSRMLLPKLRLQSTQTQDWILLDMLNELIRCPKSLYERLREEDREKFRVPIEIADEDYDAEQEPFKNTLVRHQDRFPYFALRYFDYNEIFTNLRFQIDLGTYHFSIYKKQIGDYKESHHLTHKLYGFERIQEFTKQNRPDEWRKFVKTFNSFETSKEPYIPETTPHYHLENQKIGIRFRNDNDKIWPSLKTNSEKNEKSKYKLDKSFQAEAFLSVHELLPMMFYYLLLKTENTDNDNEIETKKKENKNDKQEKHKIEEIIENKITEIYALYDTFANGEIKSIDELEEYCKGKDIEIGHLPKQMIAILKDEHKVMATEAERKQEEMLVDVQKSLESLDNQINEEIENVERKNSSLKSGKIASWLVNDMMRFQPVQKDNEGKPLNNSKANSTEYQLLQRTLAFFGSEHERLAPYFKQTKLIESSNPHPFLKDTEWEKCNNILSFYRSYLEAKKNFLESLKPEDWEKNQYFLKLKEPKTKPKTLVQGWKNGFNLPRGIFTEPIRKWFMKHRENITVAELKRVGLVAKVIPLFFSEEYKDSVQPFYNYHFNVGNINKPDEKNFLNCEERRELLRKKKDEFKKMTDKEKEENPSYLEFKSWNKFERELRLVRNQDIVTWLLCMELFNKKKIKELNVEKIYLKNINTNTTKKEKNTEEKNGEEKNIKEKNNILNRIMPMRLPIKVYGRENFSKNKKKKIRRNTFFTVYIEEKGTKLLKQGNFKALERDRRLGGLFSFVKTPSKAESKSNTISKLRVEYELGEYQKARIEIIKDMLALEKTLIDKYNSLDTDNFNKMLTDWLELKGEPDKASFQNDVDLLIAVRNAFSHNQYPMRNRIAFANINPFSLSSANTSEEKGLGIANQLKDKTHKTIEKIIEIEKPIETKE

SEQ ID NO: 328 - protein, 1127 aa, Prevotella buccae
MQKQDKLFVDRKKNAIFAFPKYITIMENKEKPEPIYYELTDKHFWAAFLNLARHNVYTTINHINRRLEIAELKDDGYMMGIKGSWNEQAKKLDKKVRLRDLIMKHFPFLEAAAYEMTNSKSPNNKEQREKEQSEALSLNNLKNVLFIFLEKLQVLRNYYSHYKYSEESPKPIFETSLLKNMYKVFDANVRLVKRDYMHHENIDMQRDFTHLNRKKQVGRTKNIIDSPNFHYHFADKEGNMTIAGLLFFVSLFLDKKDAIWMQKKLKGFKDGRNLREQMTNEVFCRSRISLPKLKLENVQTKDWMQLDMLNELVRCPKSLYERLREKDRESFKVPFDIFSDDYNAEEEPFKNTLVRHQDRFPYFVLRYFDLNEIFEQLRFQIDLGTYHFSIYNKRIGDEDEVRHLTHHLYGFARIQDFAPQNQPEEWRKLVKDLDHFETSQEPYISKTAPHYHLENEKIGIKFCSAHNNLFPSLQTDKTCNGRSKFNLGTQFTAEAFLSVHELLPMMFYYLLLTKDYSRKESADKVEGIIRKEISNIYAIYDAFANNEINSIADLTRRLQNTNILQGHLPKQMISILKGRQKDMGKEAERKIGEMIDDTQRRLDLLCKQTNQKIRIGKRNAGLLKSGKIADWLVNDMMRFQPVQKDQNNIPINNSKANSTEYRMLQRALALFGSENFRLKAYFNQMNLVGNDNPHPFLAETQWEHQTNILSFYRNYLEARKKYLKGLKPQNWKQYQHFLILKVQKTNRNTLVTGWKNSFNLPRGIFTQPIREWFEKHNNSKRIYDQILSFDRVGFVAKAIPLYFAEEYKDNVQPFYDYPFNIGNRLKPKKRQFLDKKERVELWQKNKELFKNYPSEKKKTDLAYLDFLSWKKFERELRLIKNQDIVTWLMFKELFNMATVEGLKIGEIHLRDIDTNTANEESNNILNRIMPMKLPVKTYETDNKGNILKERPLATFYIEETETKVLKQGNFKALVKDRRLNGLFSFAETTDLNLEEHPISKLSVDLELIKYQTTRISIFEMTLGLEKKLIDKYSTLPTDSFRNMLERWLQCKANRPELKNYVNSLIAVRNAFSHNQYPMYDATLFAEVKKFTLFPSVDTKKIELNIAPQLLEIVGKAIKEIEKSENKN

SEQ ID NO: 329 - protein, 1135 aa, Porphyromonas gingivalis
MNTVPASENKGQSRTVEDDPQYFGLYLNLARENLIEVESHVRIKFGKKKLNEESLKQSLLCDHLLSVDRWTKVYGHSRRYLPFLHYFDPDSQIEKDHDSKTGVDPDSAQRLIRELYSLLDFLRNDFSHNRLDGTTFEHLEVSPDISSFITGTYSLACGRAQSRFAVFFKPDDFVLAKNRKEQLISVADGKECLTVSGFAFFICLFLDREQASGMLSRIRGFKRTDENWARAVHETFCDLCIRHPHDRLESSNTKEALLLDMLNELNRCPRILYDMLPEEERAQFLPALDENSMNNLSENSLDEESRLLWDGSSDWAEALTKRIRHQDRFPYLMLRFIEEMDLLKGIRFRVDLGEIELDSYSKKVGRNGEYDRTITDHALAFGKLSDFQNEEEVSRMISGEASYPVRFSLFAPRYAIYDNKIGYCHTSDPVYPKSKTGEKRALSNPQSMGFISVHDLRKLLLMELLCEGSFSRMQSDFLRKANRILDETAEGKLQFSALFPEMRHRFIPPQNPKSKDRREKAETTLEKYKQEIKGRKDKLNSQLLSAFDMDQRQLPSRLLDEWMNIRPASHSVKLRTYVKQLNEDCRLRLRKFRKDGDGKARAIPLVGEMATFLSQDIVRMIISEETKKLITSAYYNEMQRSLAQYAGEENRRQFRAIVAELRLLDPSSGHPFLSATMETAHRYTEGFYKCYLEKKREWLAKIFYRPEQDENTKRRISVFFVPDGEARKLLPLLIRRRMKEQNDLQDWIRNKQAHPIDLPSHLFDSKVMELLKVKDGKKKWNEAFKDWWSTKYPDGMQPFYGLRRELNIHGKSVSYIPSDGKKFADCYTHLMEKTVRDKKRELRTAGKPVPPDLAADIKRSFHRAVNEREFMLRLVQEDDRLMLMAINKMMTDREEDILPGLKNIDSILDEENQFSLAVHAKVLEKEGEGGDNSLSLVPATIEIKSKRKDWSKYIRYRYDRRVPGLMSHFPEHKATLDEVKTLLGEYDRCRIKIFDWAFALEGAIMSDRDLKPYLHESSSREGKSGEHSTLVKMLVEKKGCLTPDESQYLILIRNKAAHNQFPCAAEMPLIYRDVSAKVGSIEGSSAKDLPEGSSLVDSLWKKYEMIIRKILPILDPENRFFGKLLNNMSQPINDL

SEQ ID NO: 330 - protein, 1115 aa, Bacterioides pyogenes
MESIKNSQKSTGKTLQKDPPYFGLYLNMALLNVRKVENHIRKWLGDVALLPEKSGFHSLLTTDNLSSAKWTRFYYKSRKFLPFLEMFDSDKKSYENRRETAECLDTIDRQKISSLLKEVYGKLQDIRNAFSHYHIDDQSVKHTALIISSEMHRFIENAYSFALQKTRARFTGVFVETDFLQAEEKGDNKKFFAIGGNEGIKLKDNALIFLICLFLDREEAFKFLSRATGFKSTKEKGFLAVRETFCALCCRQPHERLLSVNPREALLMDMLNELNRCPDILFEMLDEKDQKSFLPLLGEEEQAHILENSLNDELCEAIDDPFEMIASLSKRVRYKNRFPYLMLRYIEEKNLLPFIRFRIDLGCLELASYPKKMGEENNYERSVTDHAMAFGRLTDFHNEDAVLQQITKGITDEVRFSLYAPRYAIYNNKIGFVRTSGSDKISFPTLKKKGGEGHCVAYTLQNTKSFGFISIYDLRKILLLSFLDKDKAKNIVSGLLEQCEKHWKDLSENLFDAIRTELQKEFPVPLIRYTLPRSKGGKLVSSKLADKQEKYESEFERRKEKLTEILSEKDFDLSQIPRRMIDEWLNVLPTSREKKLKGYVETLKLDCRERLRVFEKREKGEHPLPPRIGEMATDLAKDIIRMVIDQGVKQRITSAYYSEIQRCLAQYAGDDNRRHLDSIIRELRLKDTKNGHPFLGKVLRPGLGHTEKLYQRYFEEKKEWLEATFYPAASPKRVPRFVNPPTGKQKELPLIIRNLMKERPEWRDWKQRKNSHPIDLPSQLFENEICRLLKDKIGKEPSGKLKWNEMFKLYWDKEFPNGMQRFYRCKRRVEVFDKVVEYEYSEEGGNYKKYYEALIDEVVRQKISSSKEKSKLQVEDLTLSVRRVFKRAINEKEYQLRLLCEDDRLLFMAVRDLYDWKEAQLDLDKIDNMLGEPVSVSQVIQLEGGQPDAVIKAECKLKDVSKLMRYCYDGRVKGLMPYFANHEATQEQVEMELRHYEDHRRRVFNWVFALEKSVLKNEKLRRFYEESQGGCEHRRCIDALRKASLVSEEEYEFLVHIRNKSAHNQFPDLEIGKLPPNVTSGFCECIWSKYKAIICRIIPFIDPERRFFGKLLEQK

SEQ ID NO: 331 - protein, 953 aa, Alistipes sp. ZOR0009
MSNEIGAFREHQFAYAPGNEKQEEATFATYFNLALSNVEGMMFGEVESNPDKIEKSLDTLPPAILRQIASFIWLSKEDHPDKAYSTEEVKVIVTDLVRRLCFYRNYFSHCFYLDTQYFYSDELVDTTAIGEKLPYNFHHFITNRLFRYSLPEITLFRWNEGERKYEILRDGLIFFCCLFLKRGQAERFLNELRFFKRTDEEGRIKRTIFTKYCTRESHKHIGIEEQDFLIFQDIIGDLNRVPKVCDGVVDLSKENERYIKNRETSNESDENKARYRLLIREKDKFPYYLMRYIVDFGVLPCITFKQNDYSTKEGRGQFHYQDAAVAQEERCYNFVVRNGNVYYSYMPQAQNVVRISELQGTISVEELRNMVYASINGKDVNKSVEQYLYHLHLLYEKILTISGQTIKEGRVDVEDYRPLLDKLLLRPASNGEELRRELRKLLPKRVCDLLSNRFDCSEGVSAVEKRLKAILLRHEQLLLSQNPALHIDKIKSVIDYLYLFFSDDEKFRQQPTEKAHRGLKDEEFQMYHYLVGDYDSHPLALWKELEASGRLKPEMRKLTSATSLHGLYMLCLKGTVEWCRKQLMSIGKGTAKVEAIADRVGLKLYDKLKEYTPEQLEREVKLVVMHGYAAAATPKPKAQAAIPSKLTELRFYSFLGKREMSFAAFIRQDKKAQKLWLRNFYTVENIKTLQKRQAAADAACKKLYNLVGEVERVHTNDKVLVLVAQRYRERLLNVGSKCAVTLDNPERQQKLADVYEVQNAWLSIRFDDLDFTLTHVNLSNLRKAYNLIPRKHILAFKEYLDNRVKQKLCEECRNVRRKEDLCTCCSPRYSNLTSWLKENHSESSIEREAATMMLLDVERKLLSFLLDERRKAIIEYGKFIPFSALVKECRLADAGLCGIRNDVLHDNVISYADAIGKLSAYFPKEASEAVEYIRRTKEVREQRREELMANSSQ

SEQ ID NO: 332 - protein, 1322 aa, Prevotella sp. MA2016
MSKECKKQRQEKKRRLQKANFSISLTGKHVFGAYFNMARTNFVKTINYILPIAGVRGNYSENQINKMLHALFLIQAGRNEELTTEQKQWEKKLRLNPEQQTKFQKLLFKHFPVLGPMMADVADHKAYLNKKKSTVQTEDETFAMLKGVSLADCLDIICLMADTLTECRNFYTHKDPYNKPSQLADQYLHQEMIAKKLDKVVVASRRILKDREGLSVNEVEFLTGIDHLHQEVLKDEFGNAKVKDGKVMKTFVEYDDFYFKISGKRLVNGYTVTTKDDKPVNVNTMLPALSDFGLLYFCVLFLSKPYAKLFIDEVRLFEYSPFDDKENMIMSEMLSIYRIRTPRLHKIDSHDSKATLAMDIFGELRRCPMELYNLLDKNAGQPFFHDEVKHPNSHTPDVSKRLRYDDRFPTLALRYIDETELFKRIRFQLQLGSFRYKFYDKENCIDGRVRVRRIQKEINGYGRMQEVADKRMDKWGDLIQKREERSVKLEHEELYINLDQFLEDTADSTPYVTDRRPAYNIHANRIGLYWEDSQNPKQYKVFDENGMYIPELVVTEDKKAPIKMPAPRCALSVYDLPAMLFYEYLREQQDNEFPSAEQVIIEYEDDYRKFFKAVAEGKLKPFKRPKEFRDFLKKEYPKLRMADIPKKLQLFLCSHGLCYNNKPETVYERLDRLTLQHLEERELHIQNRLEHYQKDRDMIGNKDNQYGKKSFSDVRHGALARYLAQSMMEWQPTKLKDKEKGHDKLTGLNYNVLTAYLATYGHPQVPEEGFTPRTLEQVLINAHLIGGSNPHPFINKVLALGNRNIEELYLHYLEEELKHIRSRIQSLSSNPSDKALSALPFIHHDRMRYHERTSEEMMALAARYTTIQLPDGLFTPYILEILQKHYTENSDLQNALSQDVPVKLNPTCNAAYLITLFYQTVLKDNAQPFYLSDKTYTRNKDGEKAESFSFKRAYELFSVLNNNKKDTFPFEMIPLFLTSDEIQERLSAKLLDGDGNPVPEVGEKGKPATDSQGNTIWKRRIYSEVDDYAEKLTDRDMKISFKGEWEKLPRWKQDKIIKRRDETRRQMRDELLQRMPRYIRDIKDNERTLRRYKTQDMVLFLLAEKMFTNIISEQSSEFNWKQMRLSKVCNEAFLRQTLTFRVPVTVGETTIYVEQENMSLKNYGEFYRFLTDDRLMSLLNNIVETLKPNENGDLVIRHTDLMSELAAYDQYRSTIFMLIQSIENLIITNNAVLDDPDADGFWVREDLPKRNNFASLLELINQLNNVELTDDERKLLVAIRNAFSHNSYNIDFSLIKDVKHLPEVAKGILQHLQSMLGVEITK

SEQ ID NO: 333 - protein, 1322 aa, Prevotella sp. MA2016; identical to SEQ ID NO: 332

SEQ ID NO: 334 - protein, 1095 aa, Riemeralla anatipesifer
MEKPLLPNVYTLKHKFFWGAFLNIARHNAFITICHINEQLGLKTPSNDDKIVDVVCETWNNILNNDHDLLKKSQLTELILKHFPFLTAMCYHPPKKEGKKKGHQKEQQKEKESEAQSQAEALNPSKLIEALEILVNQLHSLRNYYSHYKHKKPDAEKDIFKHLYKAFDASLRMVKEDYKAHFTVNLTRDFAHLNRKGKNKQDNPDFNRYRFEKDGFFTESGLLFFTNLFLDKRDAYWMLKKVSGFKASHKQREKMTTEVFCRSRILLPKLRLESRYDHNQMLLDMLSELSRCPKLLYEKLSEENKKHFQVEADGFLDEIEEEQNPFKDTLIRHQDRFPYFALRYLDLNESFKSIRFQVDLGTYHYCIYDKKIGDEQEKRHLTRTLLSFGRLQDFTEINRPQEWKALTKDLDYKETSNQPFISKTTPHYHITDNKIGFRLGTSKELYPSLEIKDGANRIAKYPYNSGFVAHAFISVHELLPLMFYQHLTGKSEDLLKETVRHIQRIYKDFEEERINTIEDLEKANQGRLPLGAFPKQMLGLLQNKQPDLSEKAKIKIEKLIAETKLLSHRLNTKLKSSPKLGKRREKLIKTGVLADWLVKDFMRFQPVAYDAQNQPIKSSKANSTEFWFIRRALALYGGEKNRLEGYFKQTNLIGNTNPHPFLNKFNWKACRNLVDFYQQYLEQREKFLEAIKNQPWEPYQYCLLLKIPKENRKNLVKGWEQGGISLPRGLFTEAIRETLSEDLMLSKPIRKEIKKHGRVGFISRAITLYFKEKYQDKHQSFYNLSYKLEAKAPLLKREEHYEYWQQNKPQSPTESQRLELHTSDRWKDYLLYKRWQHLEKKLRLYRNQDVMLWLMTLELTKNHFKELNLNYHQLKLENLAVNVQEADAKLNPLNQTLPMVLPVKVYPATAFGEVQYHKTPIRTVYIREEHTKALKMGNFKALVKDRRLNGLFSFIKEENDTQKHPISQLRLRRELEIYQSLRVDAFKETLSLEEKLLNKHTSLSSLENEFRALLEEWKKEYAASSMVTDEHIAFIASVRNAFCHNQYPFYKEALHAPIPLFTVAQPTTEEKDGLGIAEALLKVLREYCEIVKSQI

SEQ ID NO: 335 - protein, 1124 aa, Prevotella aurantiaca
MEDDKKTTGSISYELKDKHFWAAFLNLARHNVYITINHINKLLEIREIDNDEKVLDIKTLWQKGNKDLNQKARLRELMTKHFPFLETAIYTKNKEDKKEVKQEKQAEAQSLESLKDCLFLFLDKLQEARNYYSHYKYSEFSKEPEFEEGLLEKMYNIFGNNIQLVINDYQHNKDINPDEDFKHLDRKGQFKYSFADNEGNITESGLLFFVSLFLEKKDAIWMQQKLNGFKDNLENKKKMTHEVFCRSRILMPKLRLESTQTQDWILLDMLNELIRCPKSLYERLQGDDREKFKVPFDPADEDYNAEQEPFKNTLIRHQDRFPYFVLRYFDYNEIFKNLRFQIDLGTYHFSIYKKLIGGQKEDRHLTHKLYGFERIQEFAKQNRPDEWKAIVKDLDTYETSNKRYISETTPHYHLENQKIGIRFRNGNKEIWPSLKTNDENNEKSKYKLDKQYQAEAFLSVHELLPMMFYYLLLKKEKPNNDEINASIVEGFIKREIRNIFKLYDAFANGEINNIDDLEKYCADKGIPKRHLPKQMVAILYDEHKDMVKEAKRKQKEMVKDTKKLLATLEKQTQKEKEDDGRNVKLLKSGEIARWLVNDMMRFQPVQKDNEGKPLNNSKANSTEYQMLQRSLALYNNEEKPTRYFRQVNLIESNNPHPFLKWTKWEECNNILTFYYSYLTKKIEFLNKLKPEDWKKNQYFLKLKEPKTNRETLVQGWKNGFNLPRGIFTEPIREWFKRHQNNSKEYEKVEALDRVGLVTKVIPLFFKEEYFKDKEENFKEDTQKEINDCVQPFYNFPYNVGNIHKPKEKDFLHREERIELWDKKKDKFKGYKEKIKSKKLTEKDKEEFRSYLEFQSWNKFERELRLVRNQDIVTWLLCKELIDKLKIDELNIEELKKLRLNNIDTDTAKKEKNNILNRVMPMELPVTVYEIDDSHKIVKDKPLHTIYIKEAETKLLKQGNFKALVKDRRLNGLFSFVKTNSEAESKRNPISKLRVEYELGEYQEARIEIIQDMLALEEKLINKYKDLPTNKFSEMLNSWLEGKDEADKARFQNDVDFLIAVRNAFSHNQYPMHNKIEFANIKPFSLYTANNSEEKGLGIANQLKDKTKETTDKIKKIEKPIETKE

SEQ ID NO: 336 - protein, 1151 aa, Prevotella saccharolytica
MEDKPFWAAFFNLARHNVYLTVNHINKLLDLEKLYDEGKHKEIFEREDIFNISDDVMNDANSNGKKRKLDIKKIWDDLDTDLTRKYQLRELILKHFPFIQPAIIGAQTKERTTIDKDKRSTSTSNDSLKQTGEGDINDLLSLSNVKSMFFRLLQILEQLRNYYSHVKHSKSATMPNFDEDLLNWMRYIFIDSVNKVKEDYSSNSVIDPNTSFSHLIYKDEQGKIKPCRYPFTSKDGSINAFGLLFFVSLFLEKQDSIWMQKKIPGFKKASENYMKMTNEVFCRNHILLPKIRLETVYDKDWMLLDMLNEVVRCPLSLYKRLTPAAQNKFKVPEKSSDNANRQEDDNPFSRILVRHQNRFPYFVLRFFDLNEVFTTLRFQINLGCYHFAICKKQIGDKKEVHHLIRTLYGFSRLQNFTQNTRPEEWNTLVKTTEPSSGNDGKTVQGVPLPYISYTIPHYQIENEKIGIKIFDGDTAVDTDIWPSVSTEKQLNKPDKYTLTPGFKADVFLSVHELLPMMFYYQLLLCEGMLKTDAGNAVEKVLIDTRNAIFNLYDAFVQEKINTITDLENYLQDKPILIGHLPKQMIDLLKGHQRDMLKAVEQKKAMLIKDTERRLKLLDKQLKQETDVAAKNTGTLLKNGQIADWLVNDMMRFQPVKRDKEGNPINCSKANSTEYQMLQRAFAFYATDSCRLSRYFTQLHLIHSDNSHLFLSRFEYDKQPNLIAFYAAYLKAKLEFLNELQPQNWASDNYFLLLRAPKNDRQKLAEGWKNGFNLPRGLFTEKIKTWFNEHKTIVDISDCDIFKNRVGQVARLIPVFFDKKFKDHSQPFYRYDFNVGNVSKPTEANYLSKGKREELFKSYQNKFKNNIPAEKTKEYREYKNFSLWKKFERELRLIKNQDILIWLMCKNLFDEKIKPKKDILEPRIAVSYIKLDSLQTNTSTAGSLNALAKVVPMTLAIHIDSPKPKGKAGNNEKENKEFTVYIKEEGTKLLKWGNFKTLLADRRIKGLFSYIEHDDIDLKQHPLTKRRVDLELDLYQTCRIDIFQQTLGLEAQLLDKYSDLNTDNFYQMLIGWRKKEGIPRNIKEDTDFLKDVRNAFSHNQYPDSKKIAFRRIRKFNPKELILEEEEGLGIATQMYKEVEKVVNRIKRIELFD

SEQ ID NO: 337 - protein, 1159 aa, Myroides odoratimimus HMPREF9712_03108
MKDILTTDTTEKQNRFYSHKIADKYFFGGYFNLASNNIYEVFEEVNKRNTFGKLAKRDNGNLKNYIIHVFKDELSISDFEKRVAIFASYFPILETVDKKSIKERNRTIDLTLSQRIRQFREMLISLVTAVDQLRNFYTHYHHSDIVIENKVLDFLNSSFVSTALHVKDKYLKTDKTKEFLKETIAAELDILIEAYKKKQIEKKNTRFKANKREDILNAIYNEAFWSFINDKDKDKDKETVVAKGADAYFEKNHHKSNDPDFALNISEKGIVYLLSFFLTNKEMDSLKANLTGFKGKVDRESGNSIKYMATQRIYSFHTYRGLKQKIRTSEEGVKETLLMQMIDELSKVPNVVYQHLSTTQQNSFIEDWNEYYKDYEDDVETDDLSRVIHPVIRKRYEDRFNYFAIRFLDEFFDFPTLRFQVHLGDYVHDRRTKQLGKVESDRIIKEKVTVFARLKDINSAKASYFHSLEEQDKEELDNKWTLFPNPSYDFPKEHTLQHQGEQKNAGKIGIYVKLRDTQYKEKAALEEARKSLNPKERSATKASKYDIITQIIEANDNVKSEKPLVFTGQPIAYLSMNDIHSMLFSLLTDNAELKKTPEEVEAKLIDQIGKQINEILSKDTDTKILKKYKDNDLKETDTDKITRDLARDKEEIEKLILEQKQRADDYNYTSSTKFNIDKSRKRKHLLFNAEKGKIGVWLANDIKRFMFKESKSKWKGYQHTELQKLFAYFDTSKSDLELILSNMVMVKDYPIELIDLVKKSRTLVDFLNKYLEARLEYIENVITRVKNSIGTPQFKTVRKECFTFLKKSNYTVVSLDKQVERILSMPLFIERGFMDDKPTMLEGKSYKQHKEKFADWFVHYKENSNYQNFYDTEVYEITTEDKREKAKVTKKIKQQQKNDVFTLMMVNYMLEEVLKLSSNDRLSLNELYQTKEERIVNKQVAKDTQERNKNYIWNKVVDLQLCDGLVHIDNVKLKDIGNFRKYENDSRVKEFLTYQSDIVWSAYLSNEVDSNKLYVIERQLDNYESIRSKELLKEVQEIECSVYNQVANKESLKQSGNENFKQYVLQGLLPIGMDVREMLILSTDVKFKKEEIIQLGQAGEVEQDLYSLIYIRNKFAHNQLPIKEFFDFCENNYRSISDNEYYAEYYMEIFRSIKEKYAN

SEQ ID NO: 338 - protein, 1120 aa, Prevotella intermedia
MEDDKKTTDSIRYELKDKHFWAAFLNLARHNVYITVNHINKILEEDEINRDGYENTLENSWNEIKDINKKDRLSKLIIKHFPFLEATTYRQNPTDTTKQKEEKQAEAQSLESLKKSFFVFIYKLRDLRNHYSHYKHSKSLERPKFEEDLQNKMYNIFDVSIQFVKEDYKHNTDINPKKDFKHLDRKRKGKFHYSFADNEGNITESGLLFFVSLFLEKKDAIWVQKKLEGFKCSNKSYQKMTNEVFCRSRMLLPKLRLESTQTQDWILLDMLNELIRCPKSLYERLQGVNRKKFYVSFDPADEDYDAEQEPFKNTLVRHQDRFPYFALRYFDYNEVFANLRFQIDLGTYHFSIYKKLIGGQKEDRHLTHKLYGFERIQEFDKQNRPDEWKAIVKDSDTFKKKEEKEEEKPYISETTPHYHLENKKIGIAFKNHNIWPSTQTELTNNKRKKYNLGTSIKAEAFLSVHELLPMMFYYLLLKTENTKNDNKVGGKKETKKQGKHKIEAIIESKIKDIYALYDAFANGEINSEDELKEYLKGKDIKIVHLPKQMIAILKNEHKDMAEKAEAKQEKMKLATENRLKTLDKQLKGKIQNGKRYNSAPKSGEIASWLVNDMMRFQPVQKDENGESLNNSKANSTEYQLLQRTLAFFGSEHERLAPYFKQTKLIESSNPHPFLNDTEWEKCSNILSFYRSYLKARKNFLESLKPEDWEKNQYFLMLKEPKTNRETLVQGWKNGFNLPRGFFTEPIRKWFMEHWKSIKVDDLKRVGLVAKVTPLFFSEKYKDSVQPFYNYPFNVGDVNKPKEEDFLHREERIELWDKKKDKFKGYKAKKKFKEMTDKEKEEHRSYLEFQSWNKFERELRLVRNQDIVTWLLCTELIDKLKIDELNIKELKKLRLKDINTDTAKKEKNNILNRVMPMELPVTVYKVNKGGYIIKNKPLHTIYIKEAETKLLKQGNFKALVKDRRLNGLFSFVKTPSEAESESNPISKLRVEYELGKYQNARLDIIEDMLALEKKLIDKYNSLDTDNFHNMLTGWLELKGEAKKARFQNDVKLLTAVRNAFSHNQYPMYDENLFGNIERFSLSSSNIIESKGLDIAAKLKEEVSKAAKKIQNEEDNKKEKET

SEQ ID NO: 339 - protein, 1199 aa, Capnocytophaga canimorsus
MKNIQRLGKGNEFSPFKKEDKFYFGGFLNLANNNIEDFFKEIITRFGIVITDENKKPKETFGEKILNEIFKKDISIVDYEKWVNIFADYFPFTKYLSLYLEEMQFKNRVICFRDVMKELLKTVEALRNFYTHYDHEPIKIEDRVFYFLDKVLLDVSLTVKNKYLKTDKTKEFLNQHIGEELKELCKQRKDYLVGKGKRIDKESEIINGIYNNAFKDFICKREKQDDKENHNSVEKILCNKEPQNKKQKSSATVWELCSKSSSKYTEKSFPNRENDKHCLEVPISQKGIVFLLSFFLNKGEIYALTSNIKGFKAKITKEEPVTYDKNSIRYMATHRMFSFLAYKGLKRKIRTSEINYNEDGQASSTYEKETLMLQMLDELNKVPDVVYQNLSEDVQKTFIEDWNEYLKENNGDVGTMEEEQVIHPVIRKRYEDKFNYFAIRFLDEFAQFPTLRFQVHLGNYLCDKRTKQICDTTTEREVKKKITVFGRLSELENKKAIFLNEREEIKGWEVFPNPSYDFPKENISVNYKDFPIVGSILDREKQPVSNKIGIRVKIADELQREIDKAIKEKKLRNPKNRKANQDEKQKERLVNEIVSTNSNEQGEPVVFIGQPTAYLSMNDIHSVLYEFLINKISGEALETKIVEKIETQIKQIIGKDATTKILKPYTNANSNSINREKLLRDLEQEQQILKTLLEEQQQREKDKKDKKSKRKHELYPSEKGKVAVWLANDIKRFMPKAFKEQWRGYHHSLLQKYLAYYEQSKEELKNLLPKEVFKHFPFKLKGYFQQQYLNQFYTDYLKRRLSYVNELLLNIQNFKNDKDALKATEKECFKFFRKQNYIINPINIQIQSILVYPIFLKRGFLDEKPTMIDREKFKENKDTELADWFMHYKNYKEDNYQKFYAYPLEKVEEKEKFKRNKQINKQKKNDVYTLMMVEYIIQKIFGDKFVEENPLVLKGIFQSKAERQQNNTHAATTQERNLNGILNQPKDIKIQGKITVKGVKLKDIGNFRKYEIDQRVNTFLDYEPRKEWMAYLPNDWKEKEKQGQLPPNNVIDRQISKYETVRSKILLKDVQELEKIISDEIKEEHRHDLKQGKYYNFKYYILNGLLRQLKNENVENYKVFKLNTNPEKVNITQLKQEATDLEQKAFVLTYIRNKFAHNQLPKKEFWDYCQEKYGKIEKEKTYAEYFAEVFKREKEALIK

SEQ ID NO: 340 - protein, 1175 aa, Porphyromonas gulae
MTEQSERPYNGTYYTLEDKHFWAAFLNLARHNAYITLTHIDRQLAYSKADITNDQDVLSFKALWKNFDNDLERKSRLRSLILKHFSFLEGAAYGKKLFESKSSGNKSSKNKELTKKEKEELQANALSLDNLKSILFDFLQKLKDFRNYYSHYRHSGSSELPLFDGNMLQRLYNVFDVSVQRVKIDHEHNDEVDPHYHFNHLVRKGKKDRYGHNDNPSFKHHFVDGEGMVTEAGLLFFVSLFLEKRDAIWMQKKIRGFKGGTETYQQMTNEVFCRSRISLPKLKLESLRMDDWMLLDMLNELVRCPKPLYDRLREDDRACFRVPVDILPDEDDTDGGGEDPFKNTLVRHQDRFPYFALRYFDLKKVFTSLRFHIDLGTYHFAIYKKMIGEQPEDRHLTRNLYGFGRIQDFAEEHRPEEWKRLVRDLDYFETGDKPYISQTSPHYHIEKGKIGLRFMPEGQHLWPSPEVGTTRTGRSKYAQDKRLTAEAFLSVHELMPMMFYYFLLREKYSEEVSAERVQGRIKRVIEDVYAVYDAFARDEINTRDELDACLADKGIRRGHLPRQMIAILSQEHKDMEEKIRKKLQEMMADTDHRLDMLDRQTDRKIRIGRKNAGLPKSGVIADWLVRDMMRFQPVAKDASGKPLNNSKANSTEYRMLQRALALFGGEKERLTPYFRQMNLTGGNNPHPFLHETRWESHTNILSFYRSYLRARKAFLERIGRSDRVENRPFLLLKEPKTDRQTLVAGWKGEFHLPRGIFTEAVRDCLIEMGHDEVASYKEVGFMAKAVPLYFERACEDRVQPFYDSPFNVGNSLKPKKGRFLSKEERAEEWERGKERFRDLEAWSYSAARRIEDAFAGIEYASPGNKKKIEQLLRDLSLWEAFESKLKVRADRINLAKLKKEILEAQEHPYHDFKSWQKFERELRLVKNQDIITWMMCRDLMEENKVEGLDTGTLYLKDIRPNVQEQGSLNVLNRVKPMRLPVVVYRADSRGHVHKEEAPLATVYIEERDTKLLKQGNFKSFVKDRRLNGLFSFVDTGGLAMEQYPISKLRVEYELAKYQTARVCVFELTLRLEESLLTRYPHLPDESFREMLESWSDPLLAKWPELHGKVRLLIAVRNAFSHNQYPMYDEAVFSSIRKYDPSSPDAIEERMGLNIAHRLSEEVKQAKETVERIIQA

SEQ ID NO: 341 - protein, 1090 aa, Prevotella sp. P5-125
MNIPALVENQKKYFGTYSVMAMLNAQTVLDHIQKVADIEGEQNENNENLWFHPVMSHLYNAKNGYDKQPEKTMFIIERLQSYFPFLKIMAENQREYSNGKYKQNRVEVNSNDIFEVLKRAFGVLKMYRDLTNHYKTYEEKLNDGCEFLTSTEQPLSGMINNYYTVALRNMNERYGYKTEDLAFIQDKRFKFVKDAYGKKKSQVNTGFFLSLQDYNGDTQKKLHLSGVGIALLICLFLDKQYINIFLSRLPIFSSYNAQSEERRIIIRSFGINSIKLPKDRIHSEKSNKSVAMDMLNEVKRCPDELFTTLSAEKQSRFRIISDDHNEVLMKRSSDRFVPLLLQYIDYGKLFDHIRFHVNMGKLRYLLKADKTCIDGQTRVRVIEQPLNGFGRLEEAETMRKQENGTFGNSGIRIRDFENMKRDDANPANYPYIVDTYTHYILENNKVEMFINDKEDSAPLLPVIEDDRYVVKTIPSCRMSTLEIPAMAFHMFLFGSKKTEKLIVDVHNRYKRLFQAMQKEEVTAENIASFGIAESDLPQKILDLISGNAHGKDVDAFIRLTVDDMLTDTERRIKRFKDDRKSIRSADNKMGKRGFKQISTGKLADFLAKDIVLFQPSVNDGENKITGLNYRIMQSAIAVYDSGDDYEAKQQFKLMFEKARLIGKGTTEPHPFLYKVFARSIPANAVEFYERYLIERKFYLTGLSNEIKKGNRVDVPFIRRDQNKWKTPAMKTLGRIYSEDLPVELPRQMFDNEIKSHLKSLPQMEGIDFNNANVTYLIAEYMKRVLDDDFQTFYQWNRNYRYMDMLKGEYDRKGSLQHCFTSVEEREGLWKERASRTERYRKQASNKIRSNRQMRNASSEEIETILDKRLSNSRNEYQKSEKVIRRYRVQDALLFLLAKKTLTELADFDGERFKLKEIMPDAEKGILSEIMPMSFTFEKGGKKYTITSEGMKLKNYGDFFVLASDKRIGNLLELVGSDIVSKEDIMEEFNKYDQCRPEISSIVFNLEKWAFDTYPELSARVDREEKVDFKSILKILLNNKNINKEQSDILRKIRNAFDHNNYPDKGVVEIKALPEIAMSIKKAFGEYAIMK

SEQ ID NO: 342 - protein, 1150 aa, Flavobacterium branchiphilum
MENLNKILDKENEICISKIFNTKGIAAPITEKALDNIKSKQKNDLNKEARLHYFSIGHSFKQIDTKKVFDYVLIEELKDEKPLKFITLQKDFFTKEFSIKLQKLINSIRNINNHYVHNFNDINLNKIDSNVFHFLKESFELAIIEKYYKVNKKYPLDNEIVLFLKELFIKDENTALLNYFTNLSKDEAIEYILTFTITENKIWNINNEHNILNIEKGKYLTFEAMLFLITIFLYKNEANHLLPKLYDFKNNKSKQELFTFFSKKFTSQDIDAEEGHLIKFRDMIQYLNHYPTAWNNDLKLESENKNKIMTTKLIDSIIEFELNSNYPSFATDIQFKKEAKAFLFASNKKRNQTSFSNKSYNEEIRHNPHIKQYRDEIASALTPISFNVKEDKFKIFVKKHVLEEYFPNSIGYEKFLEYNDFTEKEKEDFGLKLYSNPKTNKLIERIDNHKLVKSHGRNQDRFMDFSMRFLAENNYFGKDAFFKCYKFYDTQEQDEFLQSNENNDDVKFHKGKVTTYIKYEEHLKNYSYWDCPFVEENNSMSVKISIGSEEKILKIQRNLMIYFLENALYNENVENQGYKLVNNYYRELKKDVEESIASLDLIKSNPDFKSKYKKILPKRLLHNYAPAKQDKAPENAFETLLKKADFREEQYKKLLKKAEHEKNKEDFVKRNKGKQFKLHFIRKACQMMYFKEKYNTLKEGNAAFEKKDPVIEKRKNKEHEFGHHKNLNITREEFNDYCKWMFAFNGNDSYKKYLRDLFSEKHFFDNQEYKNLFESSVNLEAFYAKTKELFKKWIETNKPTNNENRYTLENYKNLILQKQVFINVYHFSKYLIDKNLLNSENNVIQYKSLENVEYLISDFYFQSKLSIDQYKTCGKLFNKLKSNKLEDCLLYEIAYNYIDKKNVHKIDIQKILTSKIILTINDANTPYKISVPFNKLERYTEMIAIKNQNNLKARFLIDLPLYLSKNKIKKGKDSAGYEIIIKNDLEIEDINTINNKIINDSVKFTEVLMELEKYFILKDKCILSKNYIDNSEIPSLKQFSKVWIKENENEIINYRNIACHFHLPLLETFDNLLLNVEQKFIKEELQNVSTINDLSKPQEYLILLFIKFKHNNFYLNLFNKNESKTIKNDKEVKKNRVLQKFINQVILKKK

SEQ ID NO: 343 - protein, 1159 aa, Myroides odoratimimus
MKDILTTDTTEKQNRFYSHKIADKYFFGGYFNLASNNIYEVFEEVNKRNTFGKLAKRDNGNLKNYIIHVFKDELSISDFEKRVAIFASYFPILETVDKKSIKERNRTIDLTLSQRIRQFREMLISLVTAVDQLRNFYTHYHHSDIVIENKVLDFLNSSFVSTALHVKDKYLKTDKTKEFLKETIAAELDILIEAYKKKQIEKKNTRFKANKREDILNAIYNEAFWSFINDKDKDKDKETVVAKGADAYFEKNHHKSNDPDFALNISEKGIVYLLSFFLTNKEMDSLKANLTGFKGKVDRESGNSIKYMATQRIYSFHTYRGLKQKIRTSEEGVKETLLMQMIDELSKVPNVVYQHLSTTQQNSFIEDWNEYYKDYEDDVETDDLSRVTHPVIRKRYEDRFNYFAIRFLDEFFDFPTLRFQVHLGDYVHDRRTKQLGKVESDRIIKEKVTVFARLKDINSAKASYFHSLEEQDKEELDNKWTLFPNPSYDFPKEHTLQHQGEQKNAGKIGIYVKLRDTQYKEKAALEEARKSLNPKERSATKASKYDIITQIIEANDNVKSEKPLVFTGQPIAYLSMNDIHSMLFSLLTDNAELKKTPEEVEAKLIDQIGKQINEILSKDTDTKILKKYKDNDLKETDTDKITRDLARDKEEIEKLILEQKQRADDYNYTSSTKFNIDKSRKRKHLLFNAEKGKIGVWLANDIKRFMFKESKSKWKGYQHIELQKLFAYFDTSKSDLELILSNMVMVKDYPIELIDLVKKSRTLVDFLNKYLEARLEYIENVITRVKNSIGTPQFKTVRKECFTFLKKSNYTVVSLDKQVERILSMPLFIERGFMDDKPTMLEGKSYKQHKEKFADWFVHYKENSNYQNFYDTEVYEITTEDKREKAKVTKKIKQQQKNDVFTLMMVNYMLEEVLKLSSNDRLSLNELYQTKEERIVNKQVAKDTQERNKNYIWNKVVDLQLCDGLVHIDNVKLKDIGNFRKYENDSRVKEFLTYQSDIVWSAYLSNEVDSNKLYVIERQLDNYESIRSKELLKEVQEIECSVYNQVANKESLKQSGNENFKQYVLQGLLPIGMDVREMLILSTDVKFKKEEIIQLGQAGEVEQDLYSLIYIRNKFAHNQLPIKEFFDFCENNYRSISDNEYYAEYYMEIFRSIKEKYAN

SEQ ID NO: 344 - protein, 1214 aa, Flavobacterium columnare
MSSKNESYNKQKTFNHYKQEDKYFFGGFLNNADDNLRQVGKEFKTRINFNHNNNELASVFKDYFNKEKSVAKREHALNLLSNYFPVLERIQKHTNHNFEQTREIFELLLDTIKKLRDYYTHHYHKPITINPKIYDFLDDTLLDVLITIKKKKVKNDTSRELLKEKLRPELTQLKNQKREELIKKGKKLLEENLENAVFNHCLIPFLEENKTDDKQNKTVSLRKYRKSKPNEETSITLTQSGLVFLMSFFLHRKEFQVFTSGLERFKAKVNTIKEEEISLNKNNIVYMITHWSYSYYNFKGLKHRIKTDQGVSTLEQNNTTHSLTNTNTKEALLTQIVDYLSKVPNEIYETLSEKQQKEFEEDINEYMRENPENEDSTFSSIVSHKVIRKRYENKFNYFAMRFLDEYAELPTLRFMVNFGDYIKDRQKKILESIQFDSERIIKKEIHLFEKLSLVTEYKKNVYLKETSNIDLSRFPLFPNPSYVMANNNIPFYIDSRSNNLDEYLNQKKKAQSQNKKRNLTFEKYNKEQSKDAIIAMLQKEIGVKDLQQRSTIGLLSCNELPSMLYEVIVKDIKGAELENKIAQKIREQYQSIRDFTLDSPQKDNIPTTLIKTINTDSSVTFENQPIDIPRLKNALQKELTLTQEKLLNVKEHEIEVDNYNRNKNTYKFKNQPKNKVDDKKLQRKYVFYRNEIRQEANWLASDLIHFMKNKSLWKGYMHNELQSFLAFFEDKKNDCIALLETVFNLKEDCILTKGLKNLFLKHGNFIDFYKEYLKLKEDFLSTESTFLENGFIGLPPKILKKELSKRLKYIFIVFQKRQFIIKELEEKKNNLYADAINLSRGIFDEKPTMIPFKKPNPDEFASWFVASYQYNNYQSFYELTPDIVERDKKKKYKNLRAINKVKIQDYYLKLMVDTLYQDLFNQPLDKSLSDFYVSKAEREKIKADAKAYQKLNDSSLWNKVIHLSLQNNRITANPKLKDIGKYKRALQDEKIATLLTYDARTWTYALQKPEKENENDYKELHYTALNMELQEYEKVRSKELLKQVQELEKKILDKFYDFSNNASHPEDLEIEDKKGKRHPNFKLYITKALLKNESEIINLENIDIEILLKYYDYNTEELKEKIKNMDEDEKAKIINTKENYNKITNVLIKKALVLIIIRNKMAHNQYPPKFIYDLANRFVPKKEEEYFATYFNRVFETITKELWENKEKKDKTQV

SEQ ID NO: 345 - protein, 1119 aa, Porphyromonas gingivalis
MTEQNEKPYNGTYYTLEDKHFWAAFLNLARHNAYITLAHIDRQLAYSKADITNDEDILFFKGQWKNLDNDLERKARLRSLILKHFSFLEGAAYGKKLFESQSSGNKSSKKKELSKKEKEELQANALSLDNLKSILFDFLQKLKDFRNYYSHYRHPESSELPLFDGNMLQRLYNVFDVSVQRVKRDHEHNDKVDPHRHFNHLVRKGKKDKYGNNDNPFFKHHFVDREGTVTEAGLLFFVSLFLEKRDAIWMQKKIRGFKGGTEAYQQMTNEVFCRSRISLPKLKLESLRTDDWMLLDMLNELVRCPKSLYDRLREEDRARFRVPVDILSDEDDTDGTEEDPFKNTLVRHQDRFPYFALRYFDLKKVFTSLRFHIDLGTYHFAIYKKNIGEQPEDRHLTRNLYGFGRIQDFAEEHRPEEWKRLVRDLDYFETGDKPYITQTTPHYHIEKGKIGLRFVPEGQHLWPSPEVGATRTGRSKYAQDKRLTAEAFLSVHELMPMMFYYFLLREKYSEEVSAEKVQGRIKRVIEDVYAVYDAFARDEINTRDELDACLADKGIRRGHLPRQMIAILSQEHKDMEEKVRKKLQEMIADTDHRLDMLDRQTDRKIRIGRKNAGLPKSGVVADWLVRDMMRFQPVAKDTSGKPLNNSKANSTEYRMLQRALALFGGEKERLTPYFRQMNLTGGNNPHPFLHETRWESHTNILSFYRSYLEARKAFLQSIGRSDRVENHRFLLLKEPKTDRQTLVAGWKGEFHLPRGIFTEAVRDCLIEMGYDEVGSYKEVGFMAKAVPLYFERASKDRVQPFYDYPFNVGNSLKPKKGRFLSKEKRAEEWESGKERFRLAKLKKEILEAKEHPYHDFKSWQKFERELRLVKNQDIITWMMCRDLMEENKVEGLDTGTLYLKDIRTDVQEQGSLNVLNRVKPMRLPVVVYRADSRGHVHKEQAPLATVYIEERDTKLLKQGNFKSFVKDRRLNGLFSFVDTGALAMEQYPISKLRVEYELAKYQTARVCAFEQTLELEESLLTRYPHLPDKNFRKMLESWSDPLLDKWPDLHGNVRLLIAVRNAFSHNQYPMYDETLFSSIRKYDPSSPDAIEERMGLNIAHRLSEEVKQAKEMVERIIQA

SEQ ID NO: 346 - protein, 1175 aa, Porphyromonas sp. COT-052OH4946
MTEQSERPYNGTYYTLEDKHFWAAFLNLARHNAYITLTHIDRQLAYSKADITNDQDVLSFKALWKNFDNDLERKSRLRSLILKHFSFLEGAAYGKKLFESKSSGNKSSKNKELTKKEKEELQANALSLDNLKSILFDFLQKLKDFRNYYSHYRHSESSELPLFDGNMLQRLYNVFDVSVQRVKRDHEHNDKVDPHRHFNHLVRKGKKDRYGHNDNPSFKHHFVDSEGMVTEAGLLFFVSLFLEKRDAIWMQKKIRGFKGGTETYQQMTNEVFCRSRISLPKLKLESLRTDDWMLLDMLNELVRCPKPLYDRLREDDRACFRVPVDILPDEDDTDGGGEDPFKNTLVRHQDRFPYFALRYFDLKKVFTSLRFHIDLGTYHFAIYKKMIGEQPEDRHLTRNLYGFGRIQDFAEEHRPEEWKRLVRDLDYFETGDKPYISQTTPHYHIEKGKIGLRFVPEGQHLWPSPEVGTTRTGRSKYAQDKRLTAEAFLSVHELMPMMFYYFLLREKYSEEVSAEKVQGRIKRVIEDVYAIYDAFARDEINTLKELDACLADKGIRRGHLPKQMIGILSQERKDMEEKVRKKLQEMIADTDHRLDMLDRQTDRKIRIGRKNAGLPKSGVIADWLVRDMMRFQPVAKDTSGKPLNNSKANSTEYRMLQRALALFGGEKERLTPYFRQMNLTGGNNPHPFLHETRWESHTNILSFYRSYLRARKAFLERIGRSDRVENCPFLLLKEPKTDRQTLVAGWKGEFHLPRGIFTEAVRDCLIEMGYDEVGSYREVGFMAKAVPLYFERACEDRVQPFYDSPFNVGNSLKPKKGRFLSKEDRAEEWERGKERFRDLEAWSHSAARRIKDAFAGIEYASPGNKKKIEQLLRDLSLWEAFESKLKVRADKINLAKLKKEILEAQEHPYHDFKSWQKFERELRLVKNQDIITWMMCRDLMEENKVEGLDTGTLYLKDIRPNVQEQGSLNVLNRVKPMRLPVVVYRADSRGHVHKEEAPLATVYIEERDTKLLKQGNFKSFVKDRRLNGLFSFVDTGGLAMEQYPISKLRVEYELAKYQTARVCVFELTLRLEESLLSRYPHLPDESFREMLESWSDPLLAKWPELHGKVRLLIAVRNAFSHNQYPMYDEAVFSSIRKYDPSSPDAIEERMGLNIAHRLSEEVKQAKETVERIIQA

SEQ ID NO: 347 - protein, 1132 aa, Prevotella intermedia
MEDDKKTKESTNMLDNKHFWAAFLNLARHNVYITVNHINKVLELKNKKDQDIIIDNDQDILAIKTHWEKVNGDLNKTERLRELMTKHFPFLETAIYTKNKEDKEEVKQEKQAKAQSFDSLKHCLFLFLEKLQEARNYYSHYKYSESTKEPMLEKELLKKMYNIFDDNIQLVIKDYQHNKDINPDEDFKHLDRTEEEFNYYFTTNKKGNITASGLLFFVSLFLEKKDAIWMQQKLRGFKDNRESKKKMTHEVFCRSRMLLPKLRLESTQTQDWILLDMLNELIRCPKSLYERLQGEYRKKFNVPFDSADEDYDAEQEPFKNTLVRHQDRFPYFALRYFDYNEIFTNLRFQIDLGTYHFSIYKKLIGGQKEDRHLTHKLYGFERIQEFAKQNRTDEWKAIVKDFDTYETSEEPYISETAPHYHLENQKIGIRFRNDNDEIWPSLKTNGENNEKRKYKLDKQYQAEAFLSVHELLPMMFYYLLLKKEEPNNDKKNASIVEGFIKREIRDIYKLYDAFANGEINNIDDLEKYCEDKGIPKRHLPKQMVAILYDEHKDMAEEAKRKQKEMVKDTKKLLATLEKQTQGEIEDGGRNIRLLKSGEIARWLVNDMMRFQPVQKDNEGNPLNNSKANSTEYQMLQRSLALYNKEEKPTRYFRQVNLINSSNPHPFLKWTKWEECNNILSFYRSYLTKKIEFLNKLKPEDWEKNQYFLKLKEPKTNRETLVQGWKNGFNLPRGIFTEPIREWFKRHQNDSEEYEKVETLDRVGLVTKVIPLFFKKEDSKDKEEYLKKDAQKEINNCVQPFYGFPYNVGNIHKPDEKDFLPSEERKKLWGDKKYKFKGYKAKVKSKKLTDKEKEEYRSYLEFQSWNKFERELRLVRNQDIVTWLLCTELIDKLKVEGLNVEELKKLRLKDIDTDTAKQEKNNILNRVMPMQLPVTVYEIDDSHNIVKDRPLHTVYIEETKTKLLKQGNFKALVKDRRLNGLFSFVDTSSETELKSNPISKSLVEYELGEYQNARIETIKDMLLLEETLIEKYKTLPTDNFSDMLNGWLEGKDEADKARFQNDVKLLVAVRNAFSHNQYPMRNRIAFANINPFSLSSADTSEEKKLDIANQLKDKTHKIIKRIIEIEKPIETKE

SEQ ID NO: 348 - protein, 1134 aa, Prevotella intermedia 17
MKMEDDKKTKESTNMLDNKHFWAAFLNLARHNVYITVNHINKVLELKNKKDQDIIIDNDQDILAIKTHWEKVNGDLNKTERLRELMTKHFPFLETAIYTKNKEDKEEVKQEKQAKAQSFDSLKHCLFLFLEKLQEARNYYSHYKYSESTKEPMLEKELLKKMYNIFDDNIQLVIKDYQHNKDINPDEDFKHLDRTEEEFNYYFTTNKKGNITASGLLFFVSLFLEKKDAIWMQQKLRGFKDNRESKKKMTHEVFCRSRMLLPKLRLESTQTQDWILLDMLNELIRCPKSLYERLQGEYRKKFNVPFDSADEDYDAEQEPFKNTLVRHQDRFPYFALRYFDYNEIFTNLRFQIDLGTYHFSIYKKLIGGQKEDRHLTHKLYGFERIQEFAKQNRTDEWKAIVKDFDTYETSEEPYISETAPHYHLENQKIGIRFRNDNDEIWPSLKTNGENNEKRKYKLDKQYQAEAFLSVHELLPMMFYYLLLKKEEPNNDKKNASIVEGFIKREIRDIYKLYDAFANGEINNIDDLEKYCEDKGIPKRHLPKQMVAILYDEHKDMAEEAKRKQKEMVKDTKKLLATLEKQTQGEIEDGGRNIRLLKSGEIARWLVNDMMRFQPVQKDNEGNPLNNSKANSTEYQMLQRSLALYNKEEKPTRYFRQVNLINSSNPHPFLKWTKWEECNNILSFYRSYLTKKIEFLNKLKPEDWEKNQYFLKLKEPKTNRETLVQGWKNGFNLPRGIFTEPIREWFKRHQNDSEEYEKVETLDRVGLVTKVIPLFFKKEDSKDKEEYLKKDAQKEINNCVQPFYGFPYNVGNIHKPDEKDFLPSEERKKLWGDKKYKFKGYKAKVKSKKLTDKEKEEYRSYLEFQSWNKFERELRLVRNQDIVTWLLCTELIDKLKVEGLNVEELKKLRLKDIDTDTAKQEKNNILNRVMPMQLPVTVYEIDDSHNIVKDRPLHTVYIEETKTKLLKQGNFKALVKDRRLNGLFSFVDTSSETELKSNPISKSLVEYELGEYQNARIETIKDMLLLEETLIEKYKTLPTDNFSDMLNGWLEGKDEADKARFQNDVKLLVAVRNAFSHNQYPMRNRIAFANINPFSLSSADTSEEKKLDIANQLKDKTHKIIKRIIEIEKPIETKE

SEQ ID NO: 349 - protein, 1133 aa, Prevotella intermedia
MEDDKKTTDSISYELKDKHFWAAFLNLARHNVYITVNHINKVLELKNKKDQDIIIDNDQDILAIKTHWEKVNGDLNKTERLRELMTKHFPFLETAIYSKNKEDKEEVKQEKQAKAQSFDSLKHCLFLFLEKLQETRNYYSHYKYSESTKEPMLEKELLKKMYNIFDDNIQLVIKDYQHNKDINPDEDFKHLDRTEEDFNYYFTRNKKGNITESGLLFFVSLFLEKKDAIWMQQKLRGFKDNRESKKKMTHEVFCRSRMLLPKLRLESTQTQDWILLDMLNELIRCPKSLYERLQGEDREKFKVPFDPADEDYDAEQEPFKNTLVRHQDRFPYFALRYFDYNEIFTNLRFQIDLGTFHFSIYKKLIGGQKEDRHLTHKLYGFERIQEFAKQNRPDEWKAIVKDLDTYETSNERYISETTPHYHLENQKIGIRFRNDNDEIWPSLKTNGENNEKSKYKLDKQYQAEAFLSVHELLPMMFYYLLLKKEEPNNDKKNASIVEGFIKREIRDMYKLYDAFANGEINNIDDLEKYCEDKGIPKRHLPKQMVAILYDEHKDMVKEAKRKQRKMVKDTEKLLAALEKQTQEKTEDGGRNIRLLKSGEIARWLVNDMMRFQPVQKDNEGNPLNNSKANSTEYQMLQRSLALYNKEEKPTRYFRQVNLINSSNPHPFLKWTKWEECNNILSFYRSYLTKKIEFLNKLKPEDWEKNQYFLKLKEPKTNRETLVQGWKNGFNLPRGIFTEPIREWFKRHQNDSKEYEKVEALDRVGLVTKVIPLFFKKEDSKDKEEDLKKDAQKEINNCVQPFYSFPYNVGNIHKPDEKDFLHREERIELWDKKKDKFKGYKAKVKSKKLTDKEKEEYRSYLEFQSWNKFERELRLVRNQDIVTWLLCTELIDKLKVEGLNVEELKKLRLKDIDTDTAKQEKNNILNRVMPMQLPVTVYEIDDSHNIVKDRPLHTVYIEETKTKLLKQGNFKALVKDRRLNGLFSFVDTSSEAELKSNPISKSLVEYELGEYQNARIETIKDMLLLEETLIEKYKNLPTDNFSDMLNGWLEGKDEADKARFQNDVKLLVAVRNAFSHNQYPMRNRIAFANINPFSLSSADTSEEKKLDIANQLKDKTHKIIKRIIEIEKPIETKE

SEQ ID NO: 350 - protein, 1127 aa, Prevotella buccae ATCC 33574; identical to SEQ ID NO: 328

SEQ ID NO: 351 - protein, 1125 aa, Prevotella pallens HMPREF9144 1146
MKEEEKGKTPVVSTYNKDDKHFWAAFLNLARHNVYITVNHINKILGEGEINRDGYENTLEKSWNEIKDINKKDRLSKLIIKHFPFLEVTTYQRNSADTTKQKEEKQAEAQSLESLKKSFFVFIYKLRDLRNHYSHYKHSKSLERPKFEEDLQEKMYNIFDASIQLVKEDYKHNTDIKTEEDFKHLDRKGQFKYSFADNEGNITESGLLFFVSLFLEKKDAIWVQKKLEGFKCSNESYQKMTNEVFCRSRMLLPKLRLQSTQTQDWILLDMLNELIRCPKSLYERLREEDRKKFRVPIEIADEDYDAEQEPFKNALVRHQDRFPYFALRYFDYNEIFTNLRFQIDLGTYHFSIYKKQIGDYKESHHLTHKLYGFERIQEFTKQNRPDEWRKFVKTFNSFETSKEPYIPETTPHYHLENQKIGIRFRNDNDKIWPSLKTNSEKNEKSKYKLDKSFQAEAFLSVHELLPMMFYYLLLKTENTDNDNEIETKKKENKNDKQEKHKIEEIIENKITEIYALYDAFANGKINSIDKLEEYCKGKDIEIGHLPKQMIAILKSEHKDMATEAKRKQEEMLADVQKSLESLDNQINEEIENVERKNSSLKSGEIASWLVNDMMRFQPVQKDNEGNPLNNSKANSTEYQMLQRSLALYNKEEKPTRYFRQVNLIESSNPHPFLNNTEWEKCNNILSFYRSYLEAKKNFLESLKPEDWEKNQYFLMLKEPKTNCETLVQGWKNGFNLPRGIFTEPIRKWFMEHRKNITVAELKRVGLVAKVIPLFFSEEYKDSVQPFYNYLFNVGNINKPDEKNFLNCEERRELLRKKKDEFKKMTDKEKEENPSYLEFQSWNKFERELRLVRNQDIVTWLLCMELFNKKKIKELNVEKIYLKNINTNTTKKEKNTEEKNGEEKIIKEKNNILNRIMPMRLPIKVYGRENFSKNKKKKIRRNTFFTVYIEEKGTKLLKQGNFKALERDRRLGGLFSFVKTHSKAESKSNTISKSRVEYELGEYQKARIEIIKDMLALEETLIDKYNSLDTDNFHNMLTGWLKLKDEPDKASFQNDVDLLIAVRNAFSHNQYPMRNRIAFANINPFSLSSANTSEEKGLGIANQLKDKTHKTIEKIIEIEKPIETKE

SEQ ID NO: 352 - protein, 1157 aa, Myroides odoratimim HMPREF9714 02132
MKDILTTDTTEKQNRFYSHKIADKYFFGGYFNLASNNIYEVFEEVNKRNTFGKLAKRDNGNLKNYIIHVFKDELSISDFEKRVAIFASYFPILETVDKKSIKERNRTIDLTLSQRIRQFREMLISLVTAVDQLRNFYTHYHHSEIVIENKVLDFLNSSLVSTALHVKDKYLKTDKTKEFLKETIAAELDILIEAYKKKQIEKKNTRFKANKREDILNAIYNEAFWSFINDKDKDKETVVAKGADAYFEKNHHKSNDPDFALNISEKGIVYLLSFFLTNKEMDSLKANLTGFKGKVDRESGNSIKYMATQRIYSFHTYRGLKQKIRTSEEGVKETLLMQMIDELSKVPNVVYQHLSTTQQNSFIEDWNEYYKDYEDDVETDDLSRVIHPVIRKRYEDRFNYFAIRFLDEFFDFPTLRFQVHLGDYVHDRRTKQLGKVESDRIIKEKVTVFARLKDINSAKANYFHSLEEQDKEELDNKWTLFPNPSYDFPKEHTLQHQGEQKNAGKIGIYVKLRDTQYKEKAALEEARKSLNPKERSATKASKYDIITQIIEANDNVKSEKPLVFTGQPIAYLSMNDIHSMLFSLLTDNAELKKTPEEVEAKLIDQIGKQINEILSKDTDTKILKKYKDNDLKETDTDKITRDLARDKEEIEKLILEQKQRADDYNYTSSTKFNIDKSRKRKHLLFNAEKGKIGVWLANDIKRFMTEEFKSKWKGYQHTELQKLFAYYDTSKSDLDLILSDMVMVKDYPIELIALVKKSRTLVDFLNKYLEARLGYMENVITRVKNSIGTPQFKTVRKECFTFLKKSNYTVVSLDKQVERILSMPLFIERGFMDDKPTMLEGKSYQQHKEKFADWFVHYKENSNYQNFYDTEVYEITTEDKREKAKVTKKIKQQQKNDVFTLMMVNYMLEEVLKLSSNDRLSLNELYQTKEERIVNKQVAKDTQERNKNYIWNKVVDLQLCEGLVRIDKVKLKDIGNFRKYENDSRVKEFLTYQSDIVWSAYLSNEVDSNKLYVIERQLDNYESIRSKELLKEVQEIECSVYNQVANKESLKQSGNENFKQYVLQGLVPIGMDVREMLILSTDVKFIKEEIIQLGQAGEVEQDLYSLIYIRNKFAHNQLPIKEFFDFCENNYRSISDNEYYAEYYMEIFRSIKEKYTS

SEQ ID NO: 353 - protein, 1157 aa, Myoides odoratimimus HMPREF9711 00870
MKDILTTDTTEKQNRFYSHKIADKYFFGGYFNLASNNIYEVFEEVNKRNTFGKLAKRDNGNLKNYIIHVFKDELSISDFEKRVAIFASYFPILETVDKKSIKERNRTIDLTLSQRIRQFREMLISLVTAVDQLRNFYTHYHHSEIVIENKVLDFLNSSLVSTALHVKDKYLKTDKTKEFLKETIAAELDILIEAYKKKQIEKKNTRFKANKREDILNAIYNEAFWSFINDKDKDKETVVAKGADAYFEKNHHKSNDPDFALNISEKGIVYLLSFFLTNKEMDSLKANLTGFKGKVDRESGNSIKYMATQRIYSFHTYRGLKQKIRTSEEGVKETLLMQMIDELSKVPNVVYQHLSTTQQNSFIEDWNEYYKDYEDDVETDDLSRVIHPVIRKRYEDRFNYFAIRFLDEFFDFPTLRFQVHLGDYVHDRRTKQLGKVESDRIIKEKVTVFARLKDINSAKASYFHSLEEQDKEELDNKWTLFPNPSYDFPKEHTLQHQGEQKNAGKIGIYVKLRDTQYKEKAALEEARKSLNPKERSATKASKYDIITQIIEANDNVKSEKPLVFTGQPIAYLSMNDIHSMLFSLLTDNAELKKTPEEVEAKLIDQIGKQINEILSKDTDTKILKKYKDNDLKETDTDKITRDLARDKEEIEKLILEQKQRADDYNYTSSTKFNIDKSRKRKHLLFNAEKGKIGVWLANDIKRFMFKESKSKWKGYQHTELQKLFAYFDTSKSDLELILSDMVMVKDYPIELIDLVRKSRTLVDFLNKYLEARLGYIENVITRVKNSIGTPQFKTVRKECFAFLKESNYTVASLDKQIERILSMPLFIERGFMDSKPTMLEGKSYQQHKEDFADWFVHYKENSNYQNFYDTEVYEIITEDKREQAKVTKKIKQQQKNDVFTLMMVNYMLEEVLKLPSNDRLSLNELYQTKEERIVNKQVAKDTQERNKNYIWNKVVDLQLCEGLVRIDKVKLKDIGNFRKYENDSRVKEFLTYQSDIVWSGYLSNEVDSNKLYVIERQLDNYESIRSKELLKEVQEIECIVYNQVANKESLKQSGNENFKQYVLQGLLPRGTDVREMLILSTDVKFKKEEIMQLGQVREVEQDLYSLIYIRNKFAHNQLPIKEFFDFCENNYRPISDNEYYAEYYMEIFRSIKEKYAS

SEQ ID NO: 354 - protein, 1224 aa, Bergeyella zoohelcum ATCC 43767; identical to SEQ ID NO: 326

SEQ ID NO: 355 - protein, 1150 aa, Prevotella saccharolytica HMPREF9151 01387
MMEKENVQGSHIYYEPTDKCFWAAFYNLARHNAYLTIAHINSFVNSKKGINNDDKVLDIIDDWSKFDNDLLMGARLNKLILKHFPFLKAPLYQLAKRKTRKQQGKEQQDYEKKGDEDPEVIQEAIANAFKMANVRKTLHAFLKQLEDLRNHFSHYNYNSPAKKMEVKFDDGFCNKLYYVFDAALQMVKDDNRMNPEINMQTDFEHLVRLGRNRKIPNTFKYNFTNSDGTINNNGLLFFVSLFLEKRDAIWMQKKIKGFKGGTENYMRMTNEVFCRNRMVIPKLRLETDYDNHQLMFDMLNELVRCPLSLYKRLKQEDQDKFRVPIEFLDEDNEADNPYQENANSDENPTEETDPLKNTLVRHQHRFPYFVLRYFDLNEVFKQLRFQINLGCYHFSIYDKTIGERTEKRHLTRTLFGFDRLQNFSVKLQPEHWKNMVKHLDTEESSDKPYLSDAMPHYQIENEKIGIHFLKTDTEKKETVWPSLEVEEVSSNRNKYKSEKNLTADAFLSTHELLPMMFYYQLLSSEEKTRAAAGDKVQGVLQSYRKKIFDIYDDFANGTINSMQKLDERLAKDNLLRGNMPQQMLAILEHQEPDMEQKAKEKLDRLITETKKRIGKLEDQFKQKVRIGKRRADLPKVGSIADWLVNDMMRFQPAKRNADNTGVPDSKANSTEYRLLQEALAFYSAYKDRLEPYFRQVNLIGGTNPHPFLHRVDWKKCNHLLSFYHDYLEAKEQYLSHLSPADWQKHQHFLLLKVRKDIQNEKKDWKKSLVAGWKNGFNLPRGLFTESIKTWFSTDADKVQITDTKLFENRVGLIAKLIPLYYDKVYNDKPQPFYQYPFNINDRYKPEDTRKRFTAASSKLWNEKKMLYKNAQPDSSDKIEYPQYLDFLSWKKLERELRMLRNQDMMVWLMCKDLFAQCTVEGVEFADLKLSQLEVDVNVQDNLNVLNNVSSMILPLSVYPSDAQGNVLRNSKPLHTVYVQENNTKLLKQGNFKSLLKDRRLNGLFSFIAAEGEDLQQHPLTKNRLEYELSIYQTMRISVFEQTLQLEKAILTRNKTLCGNNFNNLLNSWSEHRTDKKTLQPDIDFLIAVRNAFSHNQYPMSTNTVMQGIEKFNIQTPKLEEKDGLGIASQLAKKTKDAASRLQNIINGGTN

SEQ ID NO: 356 - protein, 1175 aa, Porphyromonas gingivalis
MTEQNEKPYNGTYYTLEDKHFWAAFFNLARHNAYITLTHIDRQLAYSKADITNDEDILFFKGQWKNLDNDLERKARLRSLILKHFSFLEGAAYGKKLFESQSSGNKSSKKKELTKKEKEELQANALSLDNLKSILFDFLQKLKDFRNYYSHYRHPESSELPLFDGNMLQRLYNVFDVSVQRVKRDHEHNDKVDPHRHFNHLVRKGKKDRCGNNDNPFFKHHFVDREEKVTEAGLLFFVSLFLEKRDAIWMQKKIRGFKGGTETYQQMTNEVFCRSRISLPKLKLESLRTDDWMLLDMLNELVRCPKSLYDRLREEDRARFRVPVDILSDEDDTDGTEEDPFKNTLVRHQDRFPYFALRYFDLKKVFTSLRFHIDLGTYHFAIYKKNIGEQPEDRHLTRNLYGFGRIQDFAEEHRPEEWKRLVRDLDYFETGDKPYITQTTPHYHIEKGKIGLRFVPEGQLLWPSPEVGATRTGRSKYAQDKRFTAEAFLSVHELMPMMFYYFLLREKYSEEASAERVQGRIKRVIEDVYAVYDAFARGEIDTLDRLDACLADKGIRRGHLPRQMIAILSQEHKDMEEKVRKKLQEMIADTDHRLDMLDRQTDRKIRIGRKNAGLPKSGVIADWLVRDMMRFQPVAKDTSGKPLNNSKANSTEYRMLQRALALFGGEKERLTPYFRQMNLTGGNNPHPFLHETRWESHTNILSFYRSYLKARKAFLQSIGRSDRVENHRFLLLKEPKTDRQTLVAGWKGEFHLPRGIFTEAVRDCLIEMGLDEVGSYKEVGFMAKAVPLYFERACKDRVQPFYDYPFNVGNSLKPKKGRFLSKEKRAEEWESGKERFRDLEAWSHSAARRIEDAFAGIENASRENKKKIEQLLQDLSLWETFESKLKVKADKINIAKLKKEILEAKEHPYLDFKSWQKFERELRLVKNQDIITWMMCRDLMEENKVEGLDTGTLYLKDIRTDVHEQGSLNVLNRVKPMRLPVVVYRADSRGHVHKEQAPLATVYIEERDTKLLKQGNFKSFVKDRRLNGLFSFVDTGALAMEQYPISKLRVEYELAKYQTARVCAFEQTLELEESLLTRYPHLPDKNFRKMLESWSDPLLDKWPDLHGNVRLLIAVRNAFSHNQYPMYDETLFSSIRKYDPSSPDAIEERMGLNIAHRLSEEVKQAKEMVERIIQA

SEQ ID NO: 357 - protein, 1115 aa, Bacteroides pyrogenes F0041
MESIKNSQKSTGKTLQKDPPYFGLYLNMALLNVRKVENHIRKWLGDVALLPEKSGFHSLLTTDNLSSAKWTRFYYKSRKFLPFLEMFDSDKKSYENRRETTECLDTIDRQKISSLLKEVYGKLQDIRNAFSHYHIDDQSVKHTALIISSEMHRFIENAYSFALQKTRARFTGVFVETDFLQAEEKGDNKKFFAIGGNEGIKLKDNALIFLICLFLDREEAFKFLSRATGFKSTKEKGFLAVRETFCALCCRQPHERLLSVNPREALLMDMLNELNRCPDILFEMLDEKDQKSFLPLLGEEEQAHILENSLNDELCEAIDDPFEMIASLSKRVRYKNRFPYLMLRYIEEKNLLPFIRFRIDLGCLELASYPKKMGEENNYERSVTDHAMAFGRLTDFHNEDAVLQQITKGITDEVRFSLYAPRYAIYNNKIGFVRTGGSDKISFPTLKKKGGEGHCVAYTLQNTKSFGFISIYDLRKILLLSFLDKDKAKNIVSGLLEQCEKHWKDLSENLFDAIRTELQKEFPVPLIRYTLPRSKGGKLVSSKLADKQEKYESEFERRKEKLTEILSEKDFDLSQIPRRMIDEWLNVLPTSREKKLKGYVETLKLDCRERLRVFEKREKGEHPVPPRIGEMATDLAKDIIRMVIDQGVKQRITSAYYSEIQRCLAQYAGDDNRRHLDSIIRELRLKDTKNGHPFLGKVLRPGLGHTEKLYQRYFEEKKEWLEATFYPAASPKRVPRFVNPPTGKQKELPLIIRNLMKERPEWRDWKQRKNSHPIDLPSQLFENEICRLLKDKIGKEPSGKLKWNEMFKLYWDKEFPNGMQRFYRCKRRVEVFDKVVEYEYSEEGGNYKKYYEALIDEVVRQKISSSKEKSKLQVEDLTLSVRRVFKRAINEKEYQLRLLCEDDRLLFMAVRDLYDWKEAQLDLDKIDNMLGEPVSVSQVIQLEGGQPDAVIKAECKLKDVSKLMRYCYDGRVKGLMPYFANHEATQEQVEMELRHYEDHRRRVFNWVFALEKSVLKNEKLRRFYEESQGGCEHRRCIDALRKASLVSEEEYEFLVHIRNKSAHNQFPDLEIGKLPPNVTSGFCECIWSKYKAIICRIIPFIDPERRFFGKLLEQK

SEQ ID NO: 358 - protein, 1135 aa, Porphyromonas gingivalis F0568
MNTVPASENKGQSRTVEDDPQYFGLYLNLARENLIEVESHVRIKFGKKKLNEESLKQSLLCDHLLSVDRWTKVYGHSRRYLPFLHYFDPDSQIEKDHDSKTGVDPDSAQRLIRELYSLLDFLRNDFSHNRLDGTTFEHLEVSPDISSFITGTYSLACGRAQSRFADFFKPDDFVLAKNRKEQLISVADGKECLTVSGLAFFICLFLDREQASGMLSRIRGFKRTDENWARAVHETFCDLCIRHPHDRLESSNTKEALLLDMLNELNRCPRILYDMLPEEERAQFLPALDENSMNNLSENSLNEESRLLWDGSSDWAEALTKRIRHQDRFPYLMLRFIEEMDLLKGIRFRVDLGEIELDSYSKKVGRNGEYDRTITDHALAFGKLSDFQNEEEVSRMISGEASYPVRFSLFAPRYAIYDNKIGYCHTSDPVYPKSKTGEKRALSNPRSMGFISVHDLRKLLLMELLCEGSFSRMQSDFLRKANRILDETAEGKLQFSALFPEMRHRFIPPQNPKSKDRREKAETTLEKYKQEIKGRKDKLNSQLLSAFDMDQRQLPSRLLDEWMNIRPASHSVKLRTYVKQLNEDCRLRLQKFRKDGDGKARAIPLVGEMATFLSQDIVRMIISEETKKLITSAYYNEMQRSLAQYAGEENRHQFRAIVAELRLLDPSSGHPFLSATMETAHRYTEDFYKCYLEKKREWLAKTFYRPEQDENTKRRISVFFVPDGEARKLLPLLIRRRMKEQNDLQDWIRNKQAHPIDLPSHLFDSKIMELLKVKDGKKKWNEAFKDWWSTKYPDGMQPFYGLRRELNIHGKSVSYIPSDGKKFADCYTHLMEKTVQDKKRELRTAGKPVPPDLAADIKRSFHRAVNEREFMLRLVQEDDRLMLMAINKMMTDREEDILPGLKNIDSILDEENQFSLAVHAKVLEKEGEGGDNSLSLVPATIEIKSKRKDWSKYIRYRYDRRVPGLMSHFPEHKATLDEVKTLLGEYDRCRIKIFDWAFALEGAIMSDRDLKPYLHESSSREGKSGEHSTLVKMLVEKKGCLTPDESQYLILIRNKAAHNQFPCAAEMPLIYRDVSAKVGSIEGSSAKDLPEGSSLVDSLWKKYEMIIRKILPILDPENRFFGKLLNNMSQPINDL

SEQ ID NO: 359 - protein, 1135 aa, Porphyromonas gingivalis
MNTVPASENKGQSRTVEDDPQYFGLYLNLARENLIEVESHVRIKFGKKKLNEESLKQSLLCDHLLSVDRWTKVYGHSRRYLPFLHYFDPDSQIEKDHDSKTGVDPDSAQRLIRELYSLLDFLRNDFSHNRLDGTTFEHLEVSPDISSFITGTYSLACGRAQSRFADFFKPDDFVLAKNRKEQLISVADGKECLTVSGLAFFICLFLDREQASGMLSRIRGFKRTDENWARAVHETFCDLCIRHPHDRLESSNTKEALLLDMLNELNRCPRILYDMLPEEERAQFLPALDENSMNNLSENSLNEESRLLWDGSSDWAEALTKRIRHQDRFPYLMLRFIEEMDLLKGIRFRVDLGEIELDSYSKKVGRNGEYDRTITDHALAFGKLSDFQNEEEVSRMISGEASYPVRFSLFAPRYAIYDNKIGYCHTSDPVYPKSKTGEKRALSNPQSMGFISVHDLRKLLLMELLCEGSFSRMQSGFLRKANRILDETAEGKLQFSALFPEMRHRFIPPQNPKSKDRREKAETTLEKYKQEIKGRKDKLNSQLLSAFDMNQRQLPSRLLDEWMNIRPASHSVKLRTYVKQLNEDCRLRLRKFRKDGDGKARAIPLVGEMATFLSQDIVRMIISEETKKLITSAYYNEMQRSLAQYAGEENRRQFRAIVAELHLLDPSSGHPFLSATMETAHRYTEDFYKCYLEKKREWLAKTFYRPEQDENTKRRISVFFVPDGEARKLLPLLIRRRMKEQNDLQDWIRNKQAHPIDLPSHLFDSKIMELLKVKDGKKKWNEAFKDWWSTKYPDGMQPFYGLRRELNIHGKSVSYIPSDGKKFADCYTHLMEKTVQDKKRELRTAGKPVPPDLAADIKRSFHRAVNEREFMLRLVQEDDRLMLMAINKMMTDREEDILPGLKNIDSILDEENQFSLAVHAKVLEKEGEGGDNSLSLVPATIEIKSKRKDWSKYIRYRYDRRVPGLMSHFPEHKATLDEVKTLLGEYDRCRIKIFDWAFALEGAIMSDRDLKPYLHESSSREGKSGEHSTLVKMLVEKKGCLTPDESQYLILIRNKAAHNQFPCAAEMPLIYRDVSAKVGSIEGSSAKDLPEGSSLVDSLWKKYEMIIRKILPILDHENRFFGKLLNNMSQPINDL

SEQ ID NO: 360 - protein, 1135 aa, Porphyromonas gingivalis W4087
MNTVPASENKGQSRTVEDDPQYFGLYLNLARENLIEVESHVRIKFGKKKLNEESLKQSLLCDHLLSVDRWTKVYGHSRRYLPFLHYFDPDSQIEKDHDSKTGVDPDSAQRLIRELYSLLDFLRNDFSHNRLDGTTFEHLEVSPDISSFITGTYSLACGRAQSRFADFFKPDDFVLAKNRKEQLISVADGKECLTVSGLAFFICLFLDREQASGMLSRIRGFKRTDENWARAVHETFCDLCIRHPHDRLESSNTKEALLLDMLNELNRCPRILYDMLPEEERAQFLPALDENSMNNLSENSLNEESRLLWDGSSDWAEALTKRIRHQDRFPYLMLRFIEEMDLLKGIRFRVDLGEIELDSYSKKVGRNGEYDRTITDHALAFGKLSDFQNEEEVSRMISGEASYPVRFSLFAPRYAIYDNKIGYCHTSDPVYPKSKTGEKRALSNPRSMGFISVHDLRKLLLMELLCEGSFSRMQSDFLRKANRILDETAEGKLQFSALFPEMRHRFIPPQNPKSKDRREKAETTLEKYKQEIKGRKDKLNSQLLSAFDMDQRQLPSRLLDEWMNIRPASHSVKLRTYVKQLNEDCRLRLQKFRKDGDGKARAIPLVGEMATFLSQDIVRMIISEETKKLITSAYYNEMQRSLAQYAGEENRHQFRAIVAELRLLDPSSGHPFLSATMETAHRYTEDFYKCYLEKKREWLAKTFYRPEQDENTKRRISVFFVPDGEARKLLPLLIRRRMKEQNDLQDWIRNKQAHPIDLPSHLFDSKVMELLKVKDGKKKWNEAFKDWWSTKYPDGMQPFYGLRRELNIHGKSVSYIPSDGKKFADCYTHLMEKTVRDKKRELRTAGKPVPPDLAAYIKRSFHRAVNEREFMLRLVQEDDRLMLMAINKIMTDREEDILPGLKNIDSILDKENQFSLAVHAKVLEKEGEGGDNSLSLVPATIEIKSKRKDWSKYIRYRYDRRVPGLMSHFPEHKATLDEVKTLLGEYDRCRIKIFDWAFALEGAIMSDRDLKPYLHESSSREGKSGEHSTLVKMLVEKKGCLTPDESQYLILIRNKAAHNQFPCAAEIPLIYRDVSAKVGSIEGSSAKDLPEGSSLVDSLWKKYEMIIRKILPILDPENRFFGKLLNNMSQPINDL

SEQ ID NO: 361 - protein, 1125 aa, Prevotella intermedia ZT
MKMEDDKKTTESTNMLDNKHFWAAFLNLARHNVYITVNHINKVLELKNKKDQDIIIDNDQDILAIKTHWEKVNGDLNKTERLRELMTKHFPFLETAIYTKNKEDKEEVKQEKQAEAQSLESLKDCLFLFLEKLQEARNYYSHYKYSESTKEPMLEEGLLEKMYNIFDDNIQLVIKDYQHNKDINPDEDFKHLDRKGQFKYSFADNEGNITESGLLFFVSLFLEKKDAIWMQQKLTGFKDNRESKKKMTHEVFCRRRMLLPKLRLESTQTQDWILLDMLNELIRCPKSLYERLQGEYRKKFNVPFDSADEDYDAEQEPFKNTLVRHQDRFPYFALRYFDYNEIFTNLRFQIDLGTYHFSIYKKLIGGQKEDRHLTHKLYGFERIQEFAKQNRPDEWKALVKDLDTYETSNERYISETTPHYHLENQKIGIRFRNGNKEIWPSLKTNGENNEKSKYKLDKPYQAEAFLSVHELLPMMFYYLLLKKEEPNNDKKNASIVEGFIKREIRDMYKLYDAFANGEINNIGDLEKYCEDKGIPKRHLPKQMVAILYDEPKDMVKEAKRKQKEMVKDTKKLLATLEKQTQEEIEDGGRNIRLLKSGEIARWLVNDMMRFQPVQKDNEGNPLNNSKANSTEYQMLQRSLALYNKEEKPTRYFRQVNLINSSNPHPFLKWTKWEECNNILSFYRNYLTKKIEFLNKLKPEDWEKNQYFLKLKEPKTNRETLVQGWKNGFNLPRGIFTEPIREWFKRHQNDSKEYEKVEALKRVGLVTKVIPLFFKEEYFKEDAQKEINNCVQPFYSFPYNVGNIHKPDEKDFLPSEERKKLWGDKKDKFKGYKAKVKSKKLTDKEKEEYRSYLEFQSWNKFERELRLVRNQDIVTWLLCTELIDKMKVEGLNVEELQKLRLKDIDTDTAKQEKNNILNRIMPMQLPVTVYEIDDSHNIVKDRPLHTVYIEETKTKLLKQGNFKALVKDRRLNGLFSFVDTSSKAELKDKPISKSVVEYELGEYQNARIETIKDMLLLEKTLIKKYEKLPTDNFSDMLNGWLEGKDESDKARFQNDVKLLVAVRNAFSHNQYPMRNRIAFANINPFSLSSADISEEKKLDIANQLKDKTHKIIKKIIEIEKPIETKE

SEQ ID NO: 362 - protein, 1161 aa, Bacterioides bacterium  GWA2 31 9
MENQTQKGKGIYYYYTKNEDKHYFGSFLNLANNNIEQIIEEFRIRLSLKDEKNIKEIINNYFTDKKSYTDWERGINILKEYLPVIDYLDLAITDKEFEKIDLKQKETAKRKYFRTNFSLLIDTIIDLRNFYTHYFHKPISINPDVAKFLDKNLLNVCLDIKKQKMKTDKTKQALKDGLDKELKKLIELKKAELKEKKIKTWNITENVEGAVYNDAFNHMVYKNNAGVTILKDYHKSILPDDKIDSELKLNFSISGLVFLLSMFLSKKEIEQFKSNLEGFKGKVIGENGEYEISKFNNSLKYMATHWIFSYLTFKGLKQRVKNTFDKETLLMQMIDELNKVPHEVYQTLSKEQQNEFLEDINEYVQDNEENKKSMENSIVVHPVIRKRYDDKFNYFAIRFLDEFANFPTLKFFVTAGNFVHDKREKQIQGSMLTSDRMIKEKINVFGKLTEIAKYKSDYFSNENTLETSEWELFPNPSYLLIQNNIPVHIDLIHNTEEAKQCQIAIDRIKCTTNPAKKRNTRKSKEEIIKIIYQKNKNIKYGDPTALLSSNELPALIYELLVNKKSGKELENIIVEKIVNQYKTIAGFEKGQNLSNSLITKKLKKSEPNEDKINAEKIILAINRELEITENKLNIIKNNRAEFRTGAKRKHIFYSKELGQEATWIAYDLKRFMPEASRKEWKGFHHSELQKFLAFYDRNKNDAKALLNMFWNFDNDQLIGNDLNSAFREFHFDKFYEKYLIKRDEILEGFKSFISNFKDEPKLLKKGIKDIYRVFDKRYYIIKSTNAQKEQLLSKPICLPRGIFDNKPTYIEGVKVESNSALFADWYQYTYSDKHEFQSFYDMPRDYKEQFEKFELNNIKSIQNKKNLNKSDKFIYFRYKQDLKIKQIKSQDLFIKLMVDELFNVVFKNNIELNLKKLYQTSDERFKNQLIADVQKNREKGDTSDNKMNENFIWNMTIPLSLCNGQIEEPKVKLKDIGKFRKLETDDKVIQLLEYDKSKVWKKLEIEDELENMPNSYERIRREKLLKGIQEFEHFLLEKEKFDGINHPKHFEQDLNPNFKTYVINGVLRKNSKLNYTEIDKLLDLEHISIKDIETSAKEIHLAYFLIHVRNKFGHNQLPKLEAFELMKKYYKKNNEETYAEYFHKVSSQIVNEFKNSLEKHS

SEQ ID NO: 363 - protein, 1165 aa, Chryseobacterium jejuense
MEKTQTGLGIYYDHTKLQDKYFFGGFFNLAQNNIDNVIKAFIIKFFPERKDKDINIAQFLDICFKDNDADSDFQKKNKFLRIHFPVIGFLTSDNDKAGFKKKFALLLKTISELRNFYTHYYHKSIEFPSELFELLDDIFVKTTSEIKKLKKKDDKTQQLLNKNLSEEYDIRYQQQIERLKELKAQGKRVSLTDETAIRNGVFNAAFNHLIYRDGENVKPSRLYQSSYSEPDPAENGISLSQNSILFLLSMFLERKETEDLKSRVKGFKAKIIKQGEEQISGLKFMATHWVFSYLCFKGIKQKLSTEFHEETLLIQIIDELSKVPDEVYSAFDSKTKEKFLEDINEYMKEGNADLSLEDSKVIHPVIRKRYENKFNYFAIRFLDEYLSSTSLKFQVHVGNYVHDRRVKHINGTGFQTERIVKDRIKVFGRLSNISNLKADYIKEQLELPNDSNGWEIFPNPSYIFIDNNVPIHVLADEATKKGIELFKDKRRKEQPEELQKRKGKISKYNIVSMIYKEAKGKDKLRIDEPLALLSLNEIPALLYQILEKGATPKDIELIIKNKLTERFEKIKNYDPETPAPASQISKRLRNNTTAKGQEALNAEKLSLLIEREIENTETKLSSIEEKRLKAKKEQRRNTPQRSIFSNSDLGRIAAWLADDIKRFMPAEQRKNWKGYQHSQLQQSLAYFEKRPQEAFLLLKEGWDTSDGSSYWNNWVMNSFLENNHFEKFYKNYLMKRVKYFSELAGNIKQHTHNTKFLRKFIKQQMPADLFPKRHYILKDLETEKNKVLSKPLVFSRGLFDNNPTFIKGVKVTENPELFAEWYSYGYKTEHVFQHFYGWERDYNELLDSELQKGNSFAKNSIYYNRESQLDLIKLKQDLKIKKIKIQDLFLKRIAEKLFENVFNYPTTLSLDEFYLTQEERAEKERIALAQSLREEGDNSPNIIKDDFIWSKTIAFRSKQIYEPAIKLKDIGKFNRFVLDDEESKASKLLSYDKNKIWNKEQLERELSIGENSYEVIRREKLFKEIQNLELQILSNWSWDGINHPREFEMEDQKNTRHPNFKMYLVNGILRKNINLYKEDEDFWLESLKENDFKTLPSEVLETKSEMVQLLFLVILIRNQFAHNQLPEIQFYNFIRKNYPEIQNNTVAELYLNLIKLAVQKLKDNS

SEQ ID NO: 364 - protein, 1156 aa, Chryseobacterium carnipullorum SAMN05444360 11366
MNTRVTGMGVSYDHTKKEDKHFFGGFLNLAQDNITAVIKAFCIKFDKNPMSSVQFAESCFTDKDSDTDFQNKVRYVRTHLPVIGYLNYGGDRNTFRQKLSTLLKAVDSLRNFYTHYYHSPLALSTELFELLDTVFASVAVEVKQHKMKDDKTRQLLSKSLAEELDIRYKQQLERLKELKEQGKNIDLRDEAGIRNGVLNAAFNHLIYKEGEIAKPTLSYSSFYYGADSAENGITISQSGLLFLLSMFLGKKEIEDLKSRIRGFKAKIVRDGEENISGLKFMATHWIFSYLSFKGMKQRLSTDFHEETLLIQIIDELSKVPDEVYHDFDTATREKFVEDINEYIREGNEDFSLGDSTIIHPVIRKRYENKFNYFAVRFLDEFIKFPSLRFQVHLGNFVHDRRIKDIHGTGFQTERVVKDRIKVFGKLSEISSLKTEYIEKELDLDSDTGWEIFPNPSYVFIDNNIPIYISTNKTFKNGSSEFIKLRRKEKPEEMKMRGEDKKEKRDIASMIGNAGSLNSKTPLAMLSLNEMPALLYEILVKKTTPEEIELIIKEKLDSHFENIKNYDPEKPLPASQISKRLRNNTTDKGKKVINPEKLIHLINKEIDATEAKFALLAKNRKELKEKFRGKPLRQTIFSNMELGREATWLADDIKRFMPDILRKNWKGYQHNQLQQSLAFFNSRPKEAFTILQDGWDFADGSSFWNGWIINSFVKNRSFEYFYEAYFEGRKEYFSSLAENIKQHTSNHRNLRRFIDQQMPKGLFENRHYLLENLETEKNKILSKPLVFPRGLFDTKPTFIKGIKVDEQPELFAEWYQYGYSTEHVFQNFYGWERDYNDLLESELEKDNDFSKNSIHYSRTSQLELIKLKQDLKIKKIKIQDLFLKLIAGHIFENIFKYPASFSLDELYLTQEERLNKEQEALIQSQRKEGDHSDNIIKDNFIGSKTVTYESKQISEPNVKLKDIGKFNRFLLDDKVKTLLSYNEDKVWNKNDLDLELSIGENSYEVIRREKLFKKIQNFELQTLTDWPWNGTDHPEEFGTTDNKGVNHPNFKMYVVNGILRKHTDWFKEGEDNWLENLNETHFKNLSFQELETKSKSIQTAFLIIMIRNQFAHNQLPAVQFFEFIQKKYPEIQGSTTSELYLNFINLAVVELLELLEK

SEQ ID NO: 365 - protein, 1036 aa, Chryseobacterium ureilyticum
METQILGNGISYDHTKTEDKHFFGGFLNTAQNNIDLLIKAYISKFESSPRKLNSVQFPDVCFKKNDSDADFQHKLQFIRKHLPVIQYLKYGGNREVLKEKFRLLLQAVDSLRNFYTHFYHKPIQLPNELLTLLDTIFGEIGNEVRQNKMKDDKTRHLLKKNLSEELDFRYQEQLERLRKLKSEGKKVDLRDTEAIRNGVLNAAFNHLIFKDAEDFKPTVSYSSYYYDSDTAENGISISQSGLLFLLSMFLGRREMEDLKSRVRGFKARIIKHEEQHVSGLKFMATHWVFSEFCFKGIKTRLNADYHEETLLIQLIDELSKVPDELYRSFDVATRERFIEDINEYIRDGKEDKSLIESKIVHPVIRKRYESKFNYFAIRFLDEFVNFPTLRFQVHAGNYVHDRRIKSIEGTGFKTERLVKDRIKVFGKLSTISSLKAEYLAKAVNITDDTGWELLPHPSYVFIDNNIPIHLTVDPSFKNGVKEYQEKRKLQKPEEMKNRQGGDKMHKPAISSKIGKSKDINPESPVALLSMNEIPALLYEILVKKASPEEVEAKIRQKLTAVFERIRDYDPKVPLPASQVSKRLRNNTDTLSYNKEKLVELANKEVEQTERKLALITKNRRECREKVKGKFKRQKVFKNAELGTEATWLANDIKRFMPEEQKKNWKGYQHSQLQQSLAFFESRPGEARSLLQAGWDFSDGSSFWNGWVMNSFARDNTFDGFYESYLNGRMKYFLRLADNIAQQSSTNKLISNFIKQQMPKGLFDRRLYMLEDLATEKNKILSKPLIFPRGIFDDKPTFKKGVQVSEEPEAFADWYSYGYDVKHKFQEFYAWDRDYEELLREELEKDTAFTKNSIHYSRESQIELLAKKQDLKVKKVRIQDLYLKLMAEFLFENVFGHELALPLDQFYLTQEERLKQEQEAIVQSQRPKGDDSPNIVKENFIWSKTIPFKSGRVFEPNVKLKDIGKFRNLLTDEKVDILLSYNNTEIGKQVIENELIIGAGSYEFIRREQLFKEIQQMKRLSLRSVRGMGVPIRLNLK

SEQ ID NO: 366 - protein, 1127 aa, Prevotella buccae
MQKQDKLFVDRKKNAIFAFPKYITIMENQEKPEPIYYELTDKHFWAAFLNLARHNVYTTINHINRRLEIAELKDDGYMMDIKGSWNEQAKKLDKKVRLRDLIMKHFPFLEAAAYEITNSKSPNNKEQREKEQSEALSLNNLKNVLFIFLEKLQVLRNYYSHYKYSEESPKPIFETSLLKNMYKVFDANVRLVKRDYMHHENIDMQRDFTHLNRKKQVGRTKNIIDSPNFHYHFADKEGNMTIAGLLFFVSLFLDKKDAIWMQKKLKGFKDGRNLREQMTNEVFCRSRISLPKLKLENVQTKDWMQLDMLNELVRCPKSLYERLREKDRESFKVPFDIFSDDYDAEEEPFKNTLVRHQDRFPYFVLRYFDLNEIFEQLRFQIDLGTYHFSIYNKRIGDEDEVRHLTHHLYGFARIQDFAQQNQPEVWRKLVKDLDYFEASQEPYIPKTAPHYHLENEKIGIKFCSTHNNLFPSLKTEKTCNGRSKFNLGTQFTAEAFLSVHELLPMMFYYLLLTKDYSRKESADKVEGIIRKEISNIYAIYDAFANGEINSIADLTCRLQKTNILQGHLPKQMISILEGRQKDMEKEAERKIGEMIDDTQRRLDLLCKQTNQKIRIGKRNAGLLKSGKIADWLVNDMMRFQPVQKDQNNIPINNSKANSTEYRMLQRALALFGSENFRLKAYFNQMNLVGNDNPHPFLAETQWEHQTNILSFYRNYLEARKKYLKGLKPQNWKQYQHFLILKVQKTNRNTLVTGWKNSFNLPRGIFTQPIREWFEKHNNSKRIYDQILSFDRVGFVAKAIPLYFAEEYKDNVQPFYDYPFNIGNKLKPQKGQFLDKKERVELWQKNKELFKNYPSEKKKTDLAYLDFLSWKKFERELRLIKNQDIVTWLMFKELFNMATVEGLKIGEIHLRDIDTNTANEESNNILNRIMPMKLPVKTYETDNKGNILKERPLATFYIEETETKVLKQGNFKVLAKDRRLNGLLSFAETTDIDLEKNPITKLSVDHELIKYQTTRISIFEMTLGLEKKLINKYPTLPTDSFRNMLERWLQCKANRPELKNYVNSLIAVRNAFSHNQYPMYDATLFAEVKKFTLFPSVDTKKIELNIAPQLLEIVGKAIKEIEKSENKN

SEQ ID NO: 367 - protein, 1135 aa, Porphyromonas gingivalis
MNTVPASENKGQSRTVEDDPQYFGLYLNLARENLIEVESHVRIKFGKKKLNEESLKQSLLCDHLLSVDRWTKVYGHSRRYLPFLHYFDPDSQIEKDHDSKTGVDPDSAQRLIRELYSLLDFLRNDFSHNRLDGTTFEHLEVSPDISSFITGTYSLACGRAQSRFADFFKPDDFVLAKNRKEQLISVADGKECLTVSGLAFFICLFLDREQASGMLSRIRGFKRTDENWARAVHETFCDLCIRHPHDRLESSNTKEALLLDMLNELNRCPRILYDMLPEEERAQFLPALDENSMNNLSENSLNEESRLLWDGSSDWAEALTKRIRHQDRFPYLMLRFIEEMDLLKGIRFRVDLGEIELDSYSKKVGRNGEYDRTITDHALAFGKLSDFQNEEEVSRMISGEASYPVRFSLFAPRYAIYDNKIGYCHTSDPVYPKSKTGEKRALSNPQSMGFISVHNLRKLLLMELLCEGSFSRMQSDFLRKANRILDETAEGKLQFSALFPEMRHRFIPPQNPKSKDRREKAETTLEKYKQEIKGRKDKLNSQLLSAFDMNQRQLPSRLLDEWMNIRPASHSVKLRTYVKQLNEDCRLRLRKFRKDGDGKARAIPLVGEMATFLSQDIVRMIISEETKKLITSAYYNEMQRSLAQYAGEENRRQFRAIVAELHLLDPSSGHPFLSATMETAHRYTEDFYKCYLEKKREWLAKTFYRPEQDENTKRRISVFFVPDGEARKLLPLLIRRRMKEQNDLQDWIRNKQAHPIDLPSHLFDSKIMELLKVKDGKKKWNEAFKDWWSTKYPDGMQPFYGLRRELNIHGKSVSYIPSDGKKFADCYTHLMEKTVQDKKRELRTAGKPVPPDLAADIKRSFHRAVNEREFMLRLVQEDDRLMLMAINKMMTDREEDILPGLKNIDSILDEENQFSLAVHAKVLEKEGEGGDNSLSLVPATIEIKSKRKDWSKYIRYRYDRRVPGLMSHFPEHKATLDEVKTLLGEYDRCRIKIFDWAFALEGAIMSDRDLKPYLHESSSREGKSGEHSTLVKMLVEKKGCLTPDESQYLILIRNKAAHNQFPCAAEMPLIYRDVSAKVGSIEGSSAKDLPEGSSLVDSLWKKYEMIIRKILPILDPENRFFGKLLNNMSQPINDL

SEQ ID NO: 368 - protein, 1175 aa, Porphyromonas gingivalis
MTEQNEKPYNGTYYTLEDKHFWAAFFNLARHNAYITLAHIDRQLAYSKADITNDEDILFFKGQWKNLDNDLERKARLRSLILKHFSFLEGAAYGKKLFESQSSGNKSSKKKELTKKEKEELQANALSLDNLKSILFDFLQKLKDFRNYYSHYRHPESSELPLFDGNMLQRLYNVFDVSVQRVKRDHEHNDKVDPHRHFNHLVRKGKKDKYGNNDNPFFKHHFVDREEKVTEAGLLFFVSLFLEKRDAIWMQKKIRGFKGGTEAYQQMTNEVFCRSRISLPKLKLESLRTDDWMLLDMLNELVRCPKSLYDRLREEDRARFRVPVDILSDEDDTDGTEEDPFKNTLVRHQDRFPYFALRYFDLKKVFTSLRFHIDLGTYHFAIYKKNIGEQPEDRHLTRNLYGFGRIQDFAEEHRPEEWKRLVRDLDYFETGDKPYITQTTPHYHIEKGKIGLRFVPEGQLLWPSPEVGATRTGRSKYAQDKRFTAEAFLSVHELMPMMFYYFLLREKYSEEASAEKVQGRIKRVIEDVYAVYDAFARDEINTRDELDACLADKGIRRGHLPRQMIAILSQEHKDMEEKVRKKLQEMIADTDHRLDMLDRQTDRKIRIGRKNAGLPKSGVIADWLVRDMMRFQPVAKDTSGKPLNNSKANSTEYRMLQRALALFGGEKERLTPYFRQMNLTGGNNPHPFLHETRWESHTNILSFYRSYLKARKAFLQSIGRSDREENHRFLLLKEPKTDRQTLVAGWKSEFHLPRGIFTEAVRDCLIEMGYDEVGSYKEVGFMAKAVPLYFERACKDRVQPFYDYPFNVGNSLKPKKGRFLSKEKRAEEWESGKERFRDLEAWSHSAARRIEDAFVGIEYASWENKKKIEQLLQDLSLWETFESKLKVKADKINIAKLKKEILEAKEHPYHDFKSWQKFERELRLVKNQDIITWMMCRDLMEENKVEGLDTGTLYLKDIRTDVQEQGSLNVLNHVKPMRLPVVVYRADSRGHVHKEEAPLATVYIEERDTKLLKQGNFKSFVKDRRLNGLFSFVDTGALAMEQYPISKLRVEYELAKYQTARVCAFEQTLELEESLLTRYPHLPDESFREMLESWSDPLLDKWPDLQREVRLLIAVRNAFSHNQYPMYDETIFSSIRKYDPSSLDAIEERMGLNIAHRLSEEVKLAKEMVERIIQA

SEQ ID NO: 369 - protein, 1125 aa, Prevotella pallens; identical to SEQ ID NO: 351

SEQ ID NO: 370 - protein, 1157 aa, Myroides odoratimimus; identical to SEQ ID NO: 352

SEQ ID NO: 371 - protein, 1157 aa, Myroides odoratimimus; identical to SEQ ID NO: 353

SEQ ID NO: 372 - protein, 1127 aa, Prevotella sp. MSX73
MQKQDKLFVDRKKNAIFAFPKYITIMENQEKPEPIYYELTDKHFWAAFLNLARHNVYTTINHINRRLEIAELKDDGYMMGIKGSWNEQAKKLDKKVRLRDLIMKHFPFLEAAAYEITNSKSPNNKEQREKEQSEALSLNNLKNVLFIFLEKLQVLRNYYSHYKYSEESPKPIFETSLLKNMYKVFDANVRLVKRDYMHHENIDMQRDFTHLNRKKQVGRTKNIIDSPNFHYHFADKEGNMTIAGLLFFVSLFLDKKDAIWMQKKLKGFKDGRNLREQMTNEVFCRSRISLPKLKLENVQTKDWMQLDMLNELVRCPKSLYERLREKDRESFKVPFDIFSDDYDAEEEPFKNTLVRHQDRFPYFVLRYFDLNEIFEQLRFQIDLGTYHFSIYNKRIGDEDEVRHLTHHLYGFARIQDFAPQNQPEEWRKLVKDLDHFETSQEPYISKTAPHYHLENEKIGIKFCSTHNNLFPSLKREKTCNGRSKFNLGTQFTAEAFLSVHELLPMMFYYLLLTKDYSRKESADKVEGIIRKEISNIYAIYDAFANNEINSIADLTCRLQKTNILQGHLPKQMISILEGRQKDMEKEAERKIGEMIDDTQRRLDLLCKQTNQKIRIGKRNAGLLKSGKIADWLVSDMMRFQPVQKDTNNAPINNSKANSTEYRMLQHALALFGSESSRLKAYFRQMNLVGNANPHPFLAETQWEHQTNILSFYRNYLEARKKYLKGLKPQNWKQYQHFLILKVQKTNRNTLVTGWKNSFNLPRGIFTQPIREWFEKHNNSKRIYDQILSFDRVGFVAKAIPLYFAEEYKDNVQPFYDYPFNIGNKLKPQKGQFLDKKERVELWQKNKELFKNYPSEKNKTDLAYLDFLSWKKFERELRLIKNQDIVTWLMFKELFKTTTVEGLKIGEIHLRDIDTNTANEESNNILNRIMPMKLPVKTYETDNKGNILKERPLATFYIEETETKVLKQGNFKVLAKDRRLNGLLSFAETTDIDLEKNPITKLSVDYELIKYQTTRISIFEMTLGLEKKLIDKYSTLPTDSFRNMLERWLQCKANRPELKNYVNSLIAVRNAFSHNQYPMYDATLFAEVKKFTLFPSVDTKKIELNIAPQLLEIVGKAIKEIEKSENKN

SEQ ID NO: 373 - protein, 1119 aa, Porphyromonas gingivalis
MTEQNERPYNGTYYTLEDKHFWAAFFNLARHNAYITLAHIDRQLAYSKADITNDEDILFFKGQWKNLDNDLERKARLRSLILKHFSFLEGAAYGKKLFESQSSGNKSSKKKELTKKEKEELQANALSLDNLKSILFDFLQKLKDFRNYYSHYRHPESSELPLFDGNMLQRLYNVFDVSVQRVKRDHEHNDKVDPHRHFNHLVRKGKKDRYGNNDNPFFKHHFVDREEKVTEAGLLFFVSLFLEKRDAIWMQKKIRGFKGGTETYQQMTNEVFCRSRISLPKLKLESLRTDDWMLLDMLNELVRCPKSLYDRLREEDRARFRVPVDILSDEDDTDGTEEDPFKNTLVRHQDRFPYFALRYFDLKKVFTSLRFHIDLGTYHFAIYKKNIGEQPEDRHLTRNLYGFGRIQDFAEEHRPEEWKRLVRDLDYFETGDKPYITQTTPHYHIEKGKIGLRFVPEGQHLWPSPEVGATRTGRSKYAQDKRLTAEAFLSVHELMPMMFYYFLLREKYSDEASAERVQGRIKRVIEDVYAVYDAFARGEINTRDELDACLADKGIRRGHLPRQMIGILSQEHKDMEEKVRKKLQEMIVDTDHRLDMLDRQTDRKIRIGRKNAGLPKSGVIADWLVRDMMRFQPVAKDTSGKPLNNSKANSTEYRMLQRALALFGGEKERLTPYFRQMNLTGGNNPHPFLHETRWESHTNILSFYRSYLKARKAFLQSIGRSDRVENHRFLLLKEPKTDRQTLVAGWKGEFHLPRGIFTEAVRDCLIEMGLDEVGSYKEVGFMAKAVPLYFERACKDRVQPFYDYPFNVGNSLKPKKGRFLSKEKRAEEWESGKERFRLAKLKKEILEAKEHPYLDFKSWQKFERELRLVKNQDIITWMICRDLMEENKVEGLDTGTLYLKDIRTDVQEQGNLNVLNRVKPMRLPVVVYRADSRGHVHKEQAPLATVYIEERDTKLLKQGNFKSFVKDRRLNGLFSFVDTGALAMEQYPISKLRVEYELAKYQTARVCAFEQTLELEESLLTRYPHLPDKNFRKMLESWSDPLLDKWPDLHGNVRLLIAVRNAFSHNQYPMYDEAVFSSIRKYDPSSPDAIEERMGLNIAHRLSEEVKQAKEMAERIIQA

SEQ ID NO: 374 - protein, 1154 aa, Paludibacter propionicigenes
MKTSANNIYFNGINSFKKIFDSKGAIAPIAEKSCRNFDIKAQNDVNKEQRIHYFAVGHTFKQLDTENLFEYVLDENLRAKRPTRFISLQQFDKEFIENIKRLISDIRNINSHYIHRFDPLKIDAVPTNIIDFLKESFELAVIQIYLKEKGINYLQFSENPHADQKLVAFLHDKFLPLDEKKTSMLQNETPQLKEYKEYRKYFKTLSKQAAIDQLLFAEKETDYIWNLFDSHPVLTISAGKYLSFYSCLFLLSMFLYKSEANQLISKIKGFKKNTTEEEKSKREIFTFFSKRFNSMDIDSEENQLVKFRDLILYLNHYPVAWNKDLELDSSNPAMTDKLKSKIIELEINRSFPLYEGNERFATFAKYQIWGKKHLGKSIEKEYINASFTDEEITAYTYETDTCPELKDAHKKLADLKAAKGLFGKRKEKNESDIKKTETSIRELQHEPNPIKDKLIQRIEKNLLTVSYGRNQDRFMDFSARFLAEINYFGQDASFKMYHFYATDEQNSELEKYELPKDKKKYDSLKFHQGKLVHFISYKEHLKRYESWDDAFVIENNAIQLKLSFDGVENTVTIQRALLIYLLEDALRNIQNNTAENAGKQLLQEYYSHNKADLSAFKQILTQQDSIEPQQKTEFKKLLPRRLLNNYSPAINHLQTPHSSLPLILEKALLAEKRYCSLVVKAKAEGNYDDFIKRNKGKQFKLQFIRKAWNLMYFRNSYLQNVQAAGHHKSFHIERDEFNDFSRYMFAFEELSQYKYYLNEMFEKKGFFENNEFKILFQSGTSLENLYEKTKQKFEIWLASNTAKTNKPDNYHLNNYEQQFSNQLFFINLSHFINYLKSTGKLQTDANGQIIYEALNNVQYLIPEYYYTDKPERSESKSGNKLYNKLKATKLEDALLYEMAMCYLKADKQIADKAKHPITKLLTSDVEFNITNKEGIQLYHLLVPFKKIDAFIGLKMHKEQQDKKHPTSFLANIVNYLELVKNDKDIRKTYEAFSTNPVKRTLTYDDLAKIDGHLISKSIKFTNVTLELERYFIFKESLIVKKGNNIDFKYIKGLRNYYNNEKKKNEGIRNKAFHFGIPDSKSYDQLIRDAEVMFIANEVKPTHATKYTDLNKQLHTVCDKLMETVHNDYFSKEGDGKKKREAAGQKYFENIISAK

SEQ ID NO: 375 - protein, 1119 aa, Porphyromonas gingivalis
MTEQNEKPYNGTYYTLEDKHFWAAFFNLARHNAYITLAHIDRQLAYSKADITNDEDILFFKGQWKNLDNDLERKARLRSLILKHFSFLEGAAYGKKLFESQSSGNKSSKNKELTKKEKEELQANALSLDNLKSILFDFLQKLKDFRNYYSHYRHPESSELPLFDGNMLQRLYNVFDVSVQRVKRDHEHNDKVDPHRHFNHLVRKGKKDRYGNNDNPFFKHHFVDREGTVTEAGLLFFVSLFLEKRDAIWMQKKIRGFKGGTETYQQMTNEVFCRSRISLPKLKLESLRTDDWMLLDMLNELVRCPKSLYDRLREEDRARFRVPVDILSDEEDTDGAEEDPFKNTLVRHQDRFPYFALRYFDLKKVFTSLRFQIDLGTYHFAIYKKNIGEQPEDRHLTRNLYGFGRIQDFAEEHRPEEWKRLVRDLDYFETGDKPYITQTTPHYHIEKGKIGLRFVPEGQHLWPSPEVGATRTGRSKYAQDKRFTAEAFLSAHELMPMMFYYFLLREKYSEEASAERVQGRIKRVIEDVYAVYDAFARDEINTRDELDACLADKGIRRGHLPRQMIGILSQEHKDMEEKIRKKLQEMMADTDHRLDMLDRQTDRKIRIGRKNAGLPKSGVIADWLVRDMMRFQPVAKDTSGKPLNNSKANSTEYRMLQRALALFGGEKERLTPYFRQMNLTGGNNPHPFLHETRWESHTNILSFYRSYLKARKAFLQSIGRSDRVENHRFLLLKEPKTDRQTLVAGWKGEFHLPRGIFTEAVRDCLIEMGLDEVGSYKEVGFMAKAVPLYFERACKDWVQPFYNYPFNVGNSLKPKKGRFLSKEKRAEEWESGKERFRLAKLKKEILEAKEHPYLDFKSWQKFERELRLVKNQDIITWMICGDLMEENKVEGLDTGTLYLKDIRTDVQEQGSLNVLNRVKPMRLPVVVYRADSRGHVHKEQAPLATVYIEERDTKLLKQGNFKSFVKDRRLNGLFSFVDTGALAMEQYPISKLRVEYELAKYQTARVCAFEQTLELEESLLTRCPHLPDKNFRKMLESWSDPLLDKWPDLHRKVRLLIAVRNAFSHNQYPMYDEAVFSSIRKYDPSFPDAIEERMGLNIAHRLSEEVKQAKETVERIIQA

SEQ ID NO: 376 - protein, 1179 aa, Flavobacterium columnare
MSSKNESYNKQKTFNHYKQEDKYFFGGFLNNADDNLRQVGKEFKTRINFNHNNNELASVFKDYFNKEKSVAKREHALNLLSNYFPVLERIQKHTNHNFEQTREIFELLLDTIKKLRDYYTHHYHKPITINPKIYDFLDDTLLDVLITIKKKKVKNDTSRELLKEKLRPELTQLKNQKREELIKKGKKLLEENLENAVFNHCLRPFLEENKTDDKQNKTVSLRKYRKSKPNEETSITLTQSGLVFLMSFFLHRKEFQVFTSGLEGFKAKVNTIKEEEISLNKNNIVYMITHWSYSYYNFKGLKHRIKTDQGVSTLEQNNTTHSLTNTNTKEALLTQIVDYLSKVPNEIYETLSEKQQKEFEEDINEYMRENPENEDSTFSSIVSHKVIRKRYENKFNYFAMRFLDEYAELPTLRFMVNFGDYIKDRQKKILESIQFDSERIIKKEIHLFEKLSLVTEYKKNVYLKETSNIDLSRFPLFPNPSYVMANNNIPFYIDSRSNNLDEYLNQKKKAQSQNKKRNLTFEKYNKEQSKDAIIAMLQKEIGVKDLQQRSTIGLLSCNELPSMLYEVIVKDIKGAELENKIAQKIREQYQSIRDFTLDSPQKDNIPTTLIKTINTDSSVTFENQPIDIPRLKNAIQKELTLTQEKLLNVKEHEIEVDNYNRNKNTYKFKNQPKNKVDDKKLQRKYVFYRNEIRQEANWLASDLIHFMKNKSLWKGYMHNELQSFLAFFEDKKNDCIALLETVFNLKEDCILTKGLKNLFLKHGNFIDFYKEYLKLKEDFLNTESTFLENGLIGLPPKILKKELSKRFKYIFIVFQKRQFIIKELEEKKNNLYADAINLSRGIFDEKPTMIPFKKPNPDEFASWFVASYQYNNYQSFYELTPDIVERDKKKKYKNLRAINKVKIQDYYLKLMVDTLYQDLFNQPLDKSLSDFYVSKAEREKIKADAKAYQKRNDSSLWNKVIHLSLQNNRITANPKLKDIGKYKRALQDEKIATLLTYDDRTWTYALQKPEKENENDYKELHYTALNMELQEYEKVRSKELLKQVQELEKQILEEYTDFLSTQIHPADFEREGNPNFKKYLAHSILENEDDLDKLPEKVEAMRELDETITNPIIKKAIVLIIIRNKMAHNQYPPKFIYDLANRFVPKKEEEYFATYFNRVFETITKELWENKEKKDKTQV

SEQ ID NO: 377 - protein, 1145 aa, Psychroflexus torquis
MESIIGLGLSFNPYKTADKHYFGSFLNLVENNLNAVFAEFKERISYKAKDENISSLIEKHFIDNMSIVDYEKKISILNGYLPIIDFLDDELENNLNTRVKNFKKNFIILAEAIEKLRDYYTHFYHDPITFEDNKEPLLELLDEVLLKTILDVKKKYLKTDKTKEILKDSLREEMDLLVIRKTDELREKKKTNPKIQHTDSSQIKNSIFNDAFQGLLYEDKGNNKKTQVSHRAKTRLNPKDIHKQEERDFEIPLSTSGLVFLMSLFLSKKEIEDFKSNIKGFKGKVVKDENHNSLKYMATHRVYSILAFKGLKYRIKTDTFSKETLMMQMIDELSKVPDCVYQNLSETKQKDFIEDWNEYFKDNEENTENLENSRVVHPVIRKRYEDKFNYFAIRFLDEFANFKTLKFQVFMGYYIHDQRTKTIGTTNITTERTVKEKINVFGKLSKMDNLKKHFFSQLSDDENTDWEFFPNPSYNFLTQADNSPANNIPIYLELKNQQIIKEKDAIKAEVNQTQNRNPNKPSKRDLLNKILKTYEDFHQGDPTAILSLNEIPALLHLFLVKPNNKTGQQIENIIRIKIEKQFKAINHPSKNNKGIPKSLFADTNVRVNAIKLKKDLEAELDMLNKKHIAFKENQKASSNYDKLLKEHQFTPKNKRPELRKYVFYKSEKGEEATWLANDIKRFMPKDFKTKWKGCQHSELQRKLAFYDRHTKQDIKELLSGCEFDHSLLDINAYFQKDNFEDFFSKYLENRIETLEGVLKKLHDFKNEPTPLKGVFKNCFKFLKRQNYVTESPEIIKKRILAKPTFLPRGVFDERPTMKKGKNPLKDKNEFAEWFVEYLENKDYQKFYNAEEYRMRDADFKKNAVIKKQKLKDFYTLQMVNYLLKEVFGKDEMNLQLSELFQTRQERLKLQGIAKKQMNKETGDSSENTRNQTYIWNKDVPVSFFNGKVTIDKVKLKNIGKYKRYERDERVKTFIGYEVDEKWMMYLPHNWKDRYSVKPINVIDLQIQEYEEIRSHELLKEIQNLEQYIYDHTTDKNILLQDGNPNFKMYVLNGLLIGIKQVNIPDFIVLKQNTNFDKIDFTGIASCSELEKKTIILIAIRNKFAHNQLPNKMIYDLANEFLKIEKNETYANYYLKVLKKMISDLA

SEQ ID NO: 378 - protein, 948 aa, Riemerella anatipestifer
MFFSFHNAQRVIFKHLYKAFDASLRMVKEDYKAHFTVNLTRDFAHLNRKGKNKQDNPDFNRYRFEKDGFFTESGLLFFTNLFLDKRDAYWMLKKVSGFKASHKQREKMTTEVFCRSRILLPKLRLESRYDHNQMLLDMLSELSRCPKLLYEKLSEENKKHFQVEADGFLDEIEEEQNPFKDTLIRHQDRFPYFALRYLDLNESFKSIRFQVDLGTYHYCIYDKKIGDEQEKRHLTRTLLSFGRLQDFTEINRPQEWKALTKDLDYKETSNQPFISKTTPHYHITDNKIGFRLGTSKELYPSLEIKDGANRIAKYPYNSGFVAHAFISVHELLPLMFYQHLTGKSEDLLKETVRHIQRIYKDFEEERINTIEDLEKANQGRLPLGAFPKQMLGLLQNKQPDLSEKAKIKIEKLIAETKLLSHRLNTKLKSSPKLGKRREKLIKTGVLADWLVKDFMRFQPVAYDAQNQPIKSSKANSTEFWFIRRALALYGGEKNRLEGYFKQTNLIGNTNPHPFLNKFNWKACRNLVDFYQQYLEQREKFLEAIKHQPWEPYQYCLLLKVPKENRKNLVKGWEQGGISLPRGLFTEAIRETLSKDLTLSKPIRKEIKKHGRVGFISRAITLYFKEKYQDKHQSFYNLSYKLEAKAPLLKKEEHYEYWQQNKPQSPTESQRLELHTSDRWKDYLLYKRWQHLEKKLRLYRNQDIMLWLMTLELTKNHFKELNLNYHQLKLENLAVNVQEADAKLNPLNQTLPMVLPVKVYPTTAFGEVQYHETPIRTVYIREEQTKALKMGNFKALVKDRRLNGLFSFIKEENDTQKHPISQLRLRRELEIYQSLRVDAFKETLSLEEKLLNKHASLSSLENEFRTLLEEWKKKYAASSMVTDKHIAFIASVRNAFCHNQYPFYKETLHAPILLFTVAQPTTEEKDGLGIAEALLKVLREYCEIVKSQI

SEQ ID NO: 379 - protein, 1139 aa, Prevotella pleuritidis
MENDKRLEESACYTLNDKHFWAAFLNLARHNVYITVNHINKTLELKNKKNQEIIIDNDQDILAIKTHWAKVNGDLNKTDRLRELMIKHFPFLEAAIYSNNKEDKEEVKEEKQAKAQSFKSLKDCLFLFLEKLQEARNYYSHYKYSESSKEPEFEEGLLEKMYNTFDASIRLVKEDYQYNKDIDPEKDFKHLERKEDFNYLFTDKDNKGKITKNGLLFFVSLFLEKKDAIWMQQKFRGFKDNRGNKEKMTHEVFCRSRMLLPKIRLESTQTQDWILLDMLNELIRCPKSLYERLQGAYREKFKVPFDSIDEDYDAEQEPFRNTLVRHQDRFPYFALRYFDYNEIFKNLRFQIDLGTYHFSIYKKLIGGKKEDRHLTHKLYGFERIQEFTKQNRPDKWQAIIKDLDTYETSNERYISETTPHYHLENQKIGIRFRNDNNDIWPSLKTNGEKNEKSKYNLDKPYQAEAFLSVHELLPMMFYYLLLKMENTDNDKEDNEVGTKKKGNKNNKQEKHKIEEIIENKIKDIYALYDAFTNGEINSIDELAEQREGKDIEIGHLPKQLIVILKNKSKDMAEKANRKQKEMIKDTKKRLATLDKQVKGEIEDGGRNIRLLKSGEIARWLVNDMMRFQPVQKDNEGKPLNNSKANSTEYQMLQRSLALYNKEEKPTRYFRQVNLIKSSNPHPFLEDTKWEECYNILSFYRNYLKAKIKFLNKLKPEDWKKNQYFLMLKEPKTNRKTLVQGWKNGFNLPRGIFTEPIKEWFKRHQNDSEEYKKVEALDRVGLVAKVIPLFFKEEYFKEDAQKEINNCVQPFYSFPYNVGNIHKPEEKNFLHCEERRKLWDKKKDKFKGYKAKEKSKKMTDKEKEEHRSYLEFQSWNKFERELRLVRNQDILTWLLCTKLIDKLKIDELNIEELQKLRLKDIDTDTAKKEKNNILNRVMPMRLPVTVYEIDKSFNIVKDKPLHTVYIEETGTKLLKQGNFKALVKDRRLNGLFSFVKTSSEAESKSKPISKLRVEYELGAYQKARIDIIKDMLALEKTLIDNDENLPTNKFSDMLKSWLKGKGEANKARLQNDVGLLVAVRNAFSHNQYPMYNSEVFKGMKLLSLSSDIPEKEGLGIAKQLKDKIKETIERIIEIEKEIRN

SEQ ID NO: 380 - protein, 1135 aa, Porphyromonas gingivalis; identical to SEQ ID NO: 358

SEQ ID NO: 381 - protein, 1135 aa, Porphyromonas gingivalis
MNTVPASENKGQSRTVEDDPQYFGLYLNLARENLIEVESHVRIKFGKKKLNEESLKQSLLCDHLLSVDRWTKVYGHSRRYLPFLHYFDPDSQIEKDHDSKTGVDPDSAQRLIRELYSLLDFLRNDFSHNRLDGTTFEHLEVSPDISSFITGTYSLACGRAQSRFADFFKPDDFVLAKNRKEQLISVADGKECLTVSGLAFFICLFLDREQASGMLSRIRGFKRTNENWARAVHETFCDLCIRHPHDRLESSNTKEALLLDMLNELNRCPRILYDMLPEEERAQFLPALDENSMNNLSENSLNEESRLLWDGSSDWAEALTKRIRHQDRFPYLMLRFIEEMDLLKGIRFRVDLGEIELDSYSKKVGRNGEYDRTITDHALAFGKLSDFQNEEEVSRMISGEASYPVRFSLFAPRYAIYDNKIGYCHTSDPVYPKSKTGEKRALSNPQSMGFISVHDLRKLLLMELLCEGSFSRMQSGFLRKANRILDETAEGKLQFSALFPEMRHRFIPPQNPKSKDRREKAETTLEKYKQEIKGRKDKLNSQLLSAFDMNQRQLPSRLLDEWMNIRPASHSVKLRTYVKQLNEDCRLRLRKFRKDGDGKARAIPLVGEMATFLSQDIVRMIISEETKKLITSAYYNEMQRSLAQYAGEENRRQFRAIVAELHLLDPSSGHPFLSATMETAHRYTEDFYKCYLEKKREWLAKTFYRPEQDENTKRRISVFFVPDGEARKLLPLLIRRRMKEQNDLQDWIRNKQAHPIDLPSHLFDSKIMELLKVKDGKKKWNEAFKDWWSTKYPDGMQPFYGLRRELNIHGKSVSYIPSDGKKFADCYTHLMEKTVQDKKRELRTAGKPVPPDLAADIKRSFHRAVNEREFMLRLVQEDDRLMLMAINKMMTDREEDILPGLKNIDSILDKENQFSLAVHAKVLEKEGEGGDNSLSLVPATIEIKSKRKDWSKYIRYRYDRRVPGLMSHFPEHKATLDEVKTLLGEYDRCRIKIFDWAFALEGAIMSDRDLKPYLHESSSREGKSGEHSTLVKMLVEKKGCLTPDESQYLILIRNKAAHNQFPCAAEMPLIYRDVSAKVGSIEGSSAKDLPEGSSLVDSLWKKYEMIIRKILPILDHENRFFGKLLNNMSQPINDL

SEQ ID NO: 382 - protein, 1135 aa, Porphyromonas gingivalis; identical to SEQ ID NO: 359

SEQ ID NO: 383 - protein, 1135 aa, Porphyromonas gingivalis; identical to SEQ ID NO: 360

SEQ ID NO: 384 - protein, 1135 aa, Porphyromonas gingivalis
MNTVPASENKGQSRTVEDDPQYFGLYLNLARENLIEVESHVRIKFGKKKLNEESLKQSLLCDHLLSVDRWTKVYGHSRRYLPFLHYFDPDSQIEKDHDSKTGVDPDSAQRLIRELYSLLDFLRNDFSHNRLDGTTFEHLEVSPDISSFITGTYSLACGRAQSRFADFFKPDDFVLAKNRKEQLISVADGKECLTVSGLAFFICLFLDREQASGMLSRIRGFKRTDENWARAVHETFCDLCIRHPHDRLESSNTKEALLLDMLNELNRCPRILYDMLPEEERAQFLPALDENSMNNLSENSLNEESRLLWDGSSDWAEALTKRIRHQDRFPYLMLRFIEEMDLLKGIRFRVDLGEIELDSYSKKVGRNGEYDRTITDHALAFGKLSDFQNEEEVSRMISGEASYPVRFSLFAPRYAIYDNKIGYCHTSDPVYPKSKTGEKRALSNPRSMGFISVHDLRKLLLMELLCEGSFSRMQSDFLRKANRILDETAEGKLQFSALFPEMRHRFIPPQNPKSKDRREKAETTLEKYKQEIKGRKDKLNSQLLSAFDMNQRQLPSRLLDEWMNIRPASHSVKLRTYVKQLNEDCRLRLRKFRKDGDGKARAIPLVGEMATFLSQDIVRMIISEETKKLITSAYYNEMQRSLAQYAGEENRRQFRAIVAELHLLDPSSGHPFLSATMETAHRYTEDFYKCYLEKKREWLAKTFYRPEQDENTKRRISVFFVPDGEARKLLPLLIRRRMKEQNDLQDWIRNKQAHPIDLPSHLFDSKIMELLKVKDGKKKWNEAFKDWWSTKYPDGMQPFYGLRRELNIHGKSVSYIPSDGKKFADCYTHLMEKTVQDKKRELRTAGKPVPPDLAADIKRSFHRAVNEREFMLRLVQEDDRLMLMAINKMMTDREEDILPGLKNIDSILDEENQFSLAVHAKVLEKEGEGGDNSLSLVPATIEIKSKRKDWSKYIRYRYDRRVPGLMSHFPEHKATLDEVKTLLGEYDRCRIKIFDWAFALEGAIMSDRDLKPYLHESSSREGKSGEHSTLVKMLVEKKGCLTPDESQYLILIRNKAAHNQFPCAAEMPLIYRDVSAKVGSIEGSSAKDLPEGSSLVDSLWKKYEMIIRKILPILDPENRFFGKLLNNMSQPINDL

SEQ ID NO: 385 - protein, 1133 aa, Prevotella falsenii
MKNDNNSTKSTDYTLGDKHFWAAFLNLARHNVYITVNHINKVLELKNKKDQEIIIDNDQDILAIKTLWGKVDTDINKKDRLRELIMKHFPFLEAATYQQSSTNNTKQKEEEQAKAQSFESLKDCLFLFLEKLREARNYYSHYKHSKSLEEPKLEEKLLENMYNIFDTNVQLVIKDYEHNKDINPEEDFKHLGRAEGEFNYYFTRNKKGNITESGLLFFVSLFLEKKDAIWAQTKIKGFKDNRENKQKMTHEVFCRSRMLLPKLRLESTQTQDWILLDMLNELIRCPKSLYKRLQGEKREKFRVPFDPADEDYDAEQEPFKNTLVRHQDRFPYFALRYFDYNEIFTNLRFQIDLGTYHFSIYKKQIGDKKEDRHLTHKLYGFERIQEFAKENRPDEWKALVKDLDTFEESNEPYISETTPHYHLENQKIGIRNKNKKKKKTIWPSLETKTTVNERSKYNLGKSFKAEAFLSVHELLPMMFYYLLLNKEEPNNGKINASKVEGIIEKKIRDIYKLYGAFANEEINNEEELKEYCEGKDIAIRHLPKQMIAILKNEYKDMAKKAEDKQKKMIKDTKKRLAALDKQVKGEVEDGGRNIKPLKSGRIASWLVNDMMRFQPVQRDRDGYPLNNSKANSTEYQLLQRTLALFGSERERLAPYFRQMNLIGKDNPHPFLKDTKWKEHNNILSFYRSYLEAKKNFLGSLKPEDWKKNQYFLKLKEPKTNRETLVQGWKNGFNLPRGIFTEPIREWFIRHQNESEEYKKVKDFDRIGLVAKVIPLFFKEDYQKEIEDYVQPFYGYPFNVGNIHNSQEGTFLNKKEREELWKGNKTKFKDYKTKEKNKEKTNKDKFKKKTDEEKEEFRSYLDFQSWKKFERELRLVRNQDIVTWLLCMELIDKLKIDELNIEELQKLRLKDIDTDTAKKEKNNILNRIMPMELPVTVYETDDSNNIIKDKPLHTIYIKEAETKLLKQGNFKALVKDRRLNGLFSFVETSSEAELKSKPISKSLVEYELGEYQRARVEIIKDMLRLEETLIGNDEKLPTNKFRQMLDKWLEHKKETDDTDLKNDVKLLTEVRNAFSHNQYPMRDRIAFANIKPFSLSSANTSNEEGLGIAKKLKDKTKETIDRIIEIEEQTATKR

SEQ ID NO: 386 - protein, 1116 aa, Prevotella pleuritidis
MENDKRLEESTCYTLNDKHFWAAFLNLARHNVYITINHINKLLEIRQIDNDEKVLDIKALWQKVDKDINQKARLRELMIKHFPFLEAAIYSNNKEDKEEVKEEKQAKAQSFKSLKDCLFLFLEKLQEARNYYSHYKSSESSKEPEFEEGLLEKMYNTFGVSIRLVKEDYQYNKDIDPEKDFKHLERKEDFNYLFTDKDNKGKITKNGLLFFVSLFLEKKDAIWMQQKLRGFKDNRGNKEKMTHEVFCRSRMLLPKIRLESTQTQDWILLDMLNELIRCPKSLYERLQGAYREKFKVPFDSIDEDYDAEQEPFRNTLVRHQDRFPYFALRYFDYNEIFKNLRFQIDLGTYHFSIYKKLIGDNKEDRHLTHKLYGFERIQEFAKQKRPNEWQALVKDLDIYETSNEQYISETTPHYHLENQKIGIRFKNKKDKIWPSLETNGKENEKSKYNLDKSFQAEAFLSIHELLPMMFYDLLLKKEEPNNDEKNASIVEGFIKKEIKRMYAIYDAFANEEINSKEGLEEYCKNKGFQERHLPKQMIAILTNKSKNMAEKAKRKQKEMIKDTKKRLATLDKQVKGEIEDGGRNIRLLKSGEIARWLVNDMMRFQSVQKDKEGKPLNNSKANSTEYQMLQRSLALYNKEQKPTPYFIQVNLIKSSNPHPFLEETKWEECNNILSFYRSYLEAKKNFLESLKPEDWKKNQYFLMLKEPKTNRKTLVQGWKNGFNLPRGIFTEPIKEWFKRHQNDSEEYKKVEALDRVGLVAKVIPLFFKEEYFKEDAQKEINNCVQPFYSFPYNVGNIHKPEEKNFLHCEERRKLWDKKKDKFKGYKAKEKSKKMTDKEKEEHRSYLEFQSWNKFERELRLVRNQDIVTWLLCTELIDKLKIDELNIEELQKLRLKDIDTDTAKKEKNNILNRIMPMQLPVTVYEIDKSFNIVKDKPLHTIYIEETGTKLLKQGNFKALVKDRRLNGLFSFVKTSSEAESKSKPISKLRVEYELGAYQKARIDIIKDMLALEKTLIDNDENLPTNKFSDMLKSWLKGKGEANKARLQNDVDLLVAIRNAFSHNQYPMYNSEVFKGMKLLSLSSDIPEKEGLGIAKQLKDKIKETIERIIEIEKEIRN

SEQ ID NO: 387 - protein, 1119 aa, Porphyromonas gingivalis
MTEQNERPYNGTYYTLEDKHFWAAFFNLARHNAYITLAHIDRQLAYSKADITNDEDILFFKGQWKNLDNDLERKARLRSLILKHFSFLEGAAYGKKLFESQSSGNKSSKKKELTKKEKEELQANALSLDNLKSILFDFLQKLKDFRNYYSHYRHPESSELPLFDGNMLQRLYNVFDVSVQRVKRDHEHNDKVDPHRHFNHLVRKGKKDRYGNNDNPFFKHHFVDREGTVTEAGLLFFVSLFLEKRDAIWMQKKIRGFKGGTEAYQQMTNEVFCRSRISLPKLKLESLRTDDWMLLDMLNELVRCPKSLYDRLREEDRARFRVPIDILSDEDDTDGTEEDPFKNTLVRHQDRFPYFALRYFDLKKVFTSLRFHIDLGTYHFAIYKKNIGEQPEDRHLTRNLYGFGRIQDFAEEHRPEEWKRLVRDLDYFETGDKPYITQTTPHYHIEKGKIGLRFVPEGQHLWPSPEVGATRTGRSKYAQDKRLTAEAFLSVHELMPMMFYYFLLREKYSEEVSAEKVQGRIKRVIEDVYAVYDAFARGEIDTLDRLDACLADKGIRRGHLPRQMIAILSQEHKDMEEKVRKKLQEMIADTDHRLDMLDRQTDRKIRIGRKNAGLPKSGVIADWLVRDMMRFQPVAKDTSGKPLNNSKANSTEYRMLQRALALFGGEKERLTPYFRQMNLTGGNNPHPFLHETRWESHTNILSFYRSYLKARKAFLQSIGRSDREENHRFLLLKEPKTDRQTLVAGWKSEFHLPRGIFTEAVRDCLIEMGYDEVGSYKEVGFMAKAVPLYFERACKDRVQPFYDYPFNVGNSLKPKKGRFLSKEKRAEEWESGKERFRLAKLKKEILEAKEHPYLDFKSWQKFERELRLVKNQDIITWMMCRDLMEENKVEGLDTGTLYLKDIRTDVHEQGSLNVLNRVKPMRLPVVVYRADSRGHVHKEQAPLATVYIEERDTKLLKQGNFKSFVKDRRLNGLFSFVDTGALAMEQYPISKLRVEYELAKYQTARVCAFEQTLELEESLLTRYPHLPDKNFRKMLESWSDPLLDKWPDLHRKVRLLIAVRNAFSHNQYPMYDEAVFSSIRKYDPSSPDAIEERMGLNIAHRLSEEVKQAKEMAERIIQV

SEQ ID NO: 388 - protein, 1175 aa, Porphyromonas gulae
MTEQSERPYNGTYYTLEDKHFWAAFLNLARHNAYITLTHIDRQLAYSKADITNDQDVLSFKALWKNLDNDLERKSRLRSLILKHFSFLEGAAYGKKLFESKSSGNKSSKNKELTKKEKEELQANALSLDNLKSILFDFLQKLKDFRNYYSHYRHSGSSELPLFDGNMLQRLYNVFDVSVQRVKRDHEHNDKVDPHRHFNHLVRKGKKDRYGHNDNPSFKHHFVDSEGMVTEAGLLFFVSLFLEKRDAIWMQKKIRGFKGGTETYQQMTNEVFCRSRISLPKLKLESLRMDDWMLLDMLNELVRCPKPLYDRLREDDRACFRVPVDILPDEDDTDGGGEDPFKNTLVRHQDRFPYFALRYFDLKKVFTSLRFHIDLGTYHFAIYKKMIGEQPEDRHLTRNLYGFGRIQDFAEEHRPEEWKRLVRDLDYFETGDKPYISQTSPHYHIEKGKIGLRFMPEGQHLWPSPEVGTTRTGRSKYAQDKRLTAEAFLSVHELMPMMFYYFLLREKYSEEVSAEKVQGRIKRVIEDVYAIYDAFARDEINTLKELDACLADKGIRRGHLPKQMIAILSQEHKNMEEKVRKKLQEMIADTDHRLDMLDRQTDRKIRIGRKNAGLPKSGVIADWLVRDMMRFQPVAKDASGKPLNNSKANSTEYRMLQRALALFGGEKERLTPYFRQMNLTGGNNPHPFLHDTRWESHTNILSFYRSYLRARKAFLERIGRSDRMENRPFLLLKEPKTDRQTLVAGWKSEFHLPRGIFTEAVRDCLIEMGYDEVGSYREVGFMAKAVPLYFERACEDRVQPFYDSPFNVGNSLKPKKGRFLSKEERAEEWERGKERFRDLEAWSHSAARRIEDAFAGIEYASPGNKKKIEQLLRDLSLWEAFESKLKVRADKINLAKLKKEILEAQEHPYHDFKSWQKFERELRLVKNQDIITWMMCRDLMEENKVEGLDTGTLYLKDIRTNVQEQGSLNVLNHVKPMRLPVVVYRADSRGHVHKEEAPLATVYIEERDTKLLKQGNFKSFVKDRRLNGLFSFVDTGGLAMEQYPISKLRVEYELAKYQTARVCAFEQTLELEESLLTRYPHLPDKNFRKMLESWSDPLLAKWPELHGKVRLLIAVRNAFSHNQYPMYDEAVFSSIRKYDPSSPDAIEERMGLNIAHRLSEEVKQAKETVERIIQA

SEQ ID NO: 389 - protein, 1119 aa, Porphyromonas gulae
MTEQSERPYNGTYYTLEDKHFWAAFLNLARHNAYITLTHIDRQLAYSKADITNDQDVLSFKALWKNLDNDLERKSRLRSLILKHFSFLEGAAYGKKLFESKSSGNKSSKNKELTKKEKEELQANALSLDNLKSILFDFLQKLKDFRNYYSHYRHSGSSELPLFDGNMLQRLYNVFDVSVQRVKRDHEHNDKVDPHRHFNHLVRKGKKDRYGHNDNPSFKHHFVDGEGMVTEAGLLFFVSLFLEKRDAIWMQKKIRGFKGGTETYQQMTNEVFCRSRISLPKLKLESLRTDDWMLLDMLNELVRCPKPLYDRLREKDRARFRVPVDILPDEDDTDGGGEDPFKNTLVRHQDRFPYFALRYFDLKKVFTSLRFHIDLGTYHFAIYKKVIGEQPEDRHLTRNLYGFGRIQDFAEEHRPEEWKRLVRDLDYFETGDKPYISQTTPHYHIEKGKIGLRFVPEGQHLWPSPEVGTTRTGRSKYAQDKRLTAEAFLSVHELMPMMFYYFLLREKYSEEVSAEKVQGRIKRVIEDVYAIYDAFARDEINTRDELDACLADKGIRRGHLPKQMIGILSQEHKNMEEKVRKKLQEMIADTDHRLDMLDRQTDRKIRIGRKNAGLPKSGVIADWLVRDMMRFQPVAKDTSGKPLNNSKANSTEYRMLQRALALFGGEKERLTPYFRQMNLTGGNNPHPFLDETRWESHTNILSFYRSYLRARKAFLERIGRSDRVENRPFLLLKEPKTDRQTLVAGWKSEFHLPRGIFTEAVRDCLIEMGYDEVGSYKEVGFMAKAVPLYFERACKDRVQPFYDSPFNVGNSLKPKKGRFLSKEKRAEEWESGKERFRLAKLKKEILEAQEHPYHDFKSWQKFERELRLVKNQDIITWMMCRDLMEENKVEGLDTGTLYLKDIRPNVQEQGSLNVLNRVKPMRLPVVVYRADSRGHVHKEEAPLATVYIEERDTKLLKQGNFKSFVKDRRLNGLFSFVDTGGLAMEQYPISKLRVEYELAKYQTARVCVFELTLRLEESLLSRYPHLPDESFREMLESWSDPLLAKWPELHGKVRLLIAVRNAFSHNQYPMYDEAVFSSIRKYDPSSPDAIEERMGLNIAHRLSEEVKQAKETVERIIQA

SEQ ID NO: 390 - protein, 1119 aa, Porphyromonas gulae
MTEQSERPYNGTYYTLEDKHFWAAFLNLARHNAYITLTHIDRQLAYSKADITNDQDVLSFKALWKNFDNDLERKSRLRSLILKHFSFLEGAAYGKKLFESKSSGNKSSKNKELTKKEKEELQANALSLDNLKSILFDFLQKLKDFRNYYSHYRHSGSSELPLFDGNMLQRLYNVFDVSVQRVKRDHEHNDKVDPHYHFNHLVRKGKKDRYGHNDNPSFKHHFVDSEGMVTEAGLLFFVSLFLEKRDAIWMQKKIRGFKGGTGPYEQMTNEVFCRSRISLPKLKLESLRTDDWMLLDMLNELVRCPKPLYDRLREKDRACFRVPVDILPDEDDTDGGGEDPFKNTLVRHQDRFPYFALRYFDLKKVFTSLRFHIDLGTYHFAIYKKMIGEQPEDRHLTRNLYGFGRIQDFAEEHRPEEWKRLVRDLDYFETGDKPYISQTTPHYHIEKGKIGLRFMPEGQHLWPSPEVGTTRTGRSKYAQDKRLTAEAFLSVHELMPMMFYYFLLREKYSEEVSAEKVQGRIKRVIKDVYAIYDAFARDEINTLKELDACSADKGIRRGHLPKQMIGILSQEHKNMEEKVRKKLQEMIADTDHRLDMLDRQTDRKIRIGRKNAGLPKSGVIADWLVRDMMRFQPVAKDTSGKPLNNSKANSTEYRMLQRALALFGGEKERLTPYFRQMNLTGGNNPHPFLDETRWESHTNILSFYRSYLRARKAFLERIGRSDRVENRPFLLLKEPKNDRQTLVAGWKSEFHLPRGIFTEAVRDCLIEMGYDEVGSYKEVGFMAKAVPLYFERACKDRVQPFYDSPFNVGNSLKPKKGRFLSKEKRAEEWESGKERFRLAKLKKEILEAKEHPYHDFKSWQKFERELRLVKNQDIITWMMCRDLMEENKVEGLDTGTLYLKDIRTDVHEQGSLNVLNRVKPMRLPVVVYRADSRGHVHKEQAPLATVYIEERDTKLLKQGNFKSFVKDRRLNGLFSFVDTGGLAMEQYPISKLRVEYELAKYQTARVCAFEQTLELEESLLTRYPHLPDENFREMLESWSDPLLGKWPDLHGKVRLLIAVRNAFSHNQYPMYDEAVFSSIRKYDPSSPDAIEERMGLNIAHRLSEEVKQAKETVERIIQA

SEQ ID NO: 391 - protein, 1175 aa, Porphyromonas gulae
MTEQSERPYNGTYYTLEDKHFWAAFLNLARHNAYITLTHIDRQLAYSKADITNDQDVLSFKALWKNFDNDLERKSRLRSLILKHFSFLEGAAYGKKLFESKSSGNKSSKNKELTKKEKEELQANALSLDNLKSILFDFLQKLKDFRNYYSHYRHSESSELPLFDGNMLQRLYNVFDVSVQRVKRDHEHNDKVDPHRHFNHLVRKGKKDRYGHNDNPSFKHHFVDGEGMVTEAGLLFFVSLFLEKRDAIWMQKKIRGFKGGTETYQQMTNEVFCRSRISLPKLKLESLRTDDWMLLDMLNELVRCPKPLYDRLREDDRACFRVPVDILPDEDDTDGGGEDPFKNTLVRHQDRFPYFALRYFDLKKVFTSLRFHIDLGTYHFAIYKKMIGEQPEDRHLTRNLYGFGRIQDFAEEHRPEEWKRLVRDLDYFETGDKPYISQTSPHYHIEKGKIGLRFMPEGQHLWPSPEVGTTRTGRSKYAQDKRLTAEAFLSVHELMPMMFYYFLLREKYSEEVSAEKVQGRIKRVIEDVYAIYDAFARDEINTLKELDACLADKGIRRGHLPKQMIAILSQEHKDMEEKIRKKLQEMIADTDHRLDMLDRQTDRKIRIGRKNAGLPKSGVIADWLVRDMMRFQPVAKDTSGKPLNNSKANSTEYRMLQRALALFGGEKKRLTPYFRQMNLTGGNNPHPFLHETRWESHTNILSFYRSYLRARKAFLERIGRSDRMENRPFLLLKEPKTDRQTLVAGWKSEFHLPRGIFTEAVRDCLIEMGYDEVGSYREVGFMAKAVPLYFERACEDRVQPFYDSPFNVGNSLKPKKGRFLSKEERAEEWERGKERFRDLEAWSHSAARRIEDAFAGIEYASPGNKKKIEQLLRDLSLWEAFESKLKVRADKINLAKLKKEILEAQEHPYHDFKSWQKFERELRLVKNQDIITWMMCRDLMEENKVEGLDTGTLYLKDIRPNVQEQGSLNVLNRVKPMRLPVVVYRADSRGHVHKEEAPLATVYIEERDTKLLKQGNFKSFVKDRRLNGLFSFVDTGGLAMEQYPISKLRVEYELAKYQTARVCVFELTLRLEESLLTRYPHLPDESFRKMLESWSDPLLAKWPELHGKVRLLIAVRNAFSHNQYPMYDEAVFSSIRKYDPSSPDAIEERMGLNIAHRLSEEVKQAKETVERIIQV

SEQ ID NO: 392 - protein, 1119 aa, Poprhyromonas gulae
MTEQSERPYNGTYYTLEDKHFWAAFLNLARHNAYITLTHIDRQLAYSKADITNDEDILFFKGQWKNLDNDLERKSRLRSLILKHFSFLEGAAYGKKFFESKSSGNKSSKNKELTKKEKEELQANALSLDNLKSILFDFLQKLKDFRNYYSHYRHSGSSELPLFDGNMLQRLYNVFDVSVQRVKRDHEHNDEVDPHYHFNHLVRKGKKDRYGHNDNPSFKHHFVDGEGMVTEAGLLFFVSLFLEKRDAIWMQKKIRGFKGGTEPYEQMTNEVFCRSRISLPKLKLESLRTDDWMLLDMLNELVRCPKPLYDRLREKDRACFRVPVDILPDEDDTDGGGEDPFKNTLVRHQDRFPYFALRYFDLKKVFTSLRFHIDLGTYHFAIYKKMIGEQPEDRHLTRNLYGFGRIQDFAEEHRPEEWKRLVRDLDYFETGDKPYISQTTPHYHIEKGKIGLRFVPEGQHLWPSPEVGTTRTGRSKYAQDKRLTAEAFLSVHELMPMMFYYFLLREKYSEEVSAEKVQGRIKRVIEDVYAIYDAFARDEINTLKELDACLADKGIRRGHLPKQMIGILSQERKDMEEKVRKKLQEMIADTDHRLDMLDRQTDRKIRIGRKNAGLPKSGVIADWLVRDMMRFQPVAKDTSGKPLNNSKANSTEYRMLQRALALFGGEKERLTPYFRQMNLTGGNNPHPFLHETRWESHTNILSFYRSYLRARKAFLERIGRSDRVENCPFLLLKEPKTDRQTLVAGWKGEFHLPRGIFTEAVRDCLIEMGYDEVGSYREVGFMAKAVPLYFERACEDRVQPFYDSPFNVGNSLKPKKGRFLSKEKRAEEWESGKERFRLAKLKKEILEAQEHPYHDFKSWQKFERELRLVKNQDIITWMMCRDLMEENKVEGLDTGTLYLKDIRPNVQEQGSLNVLNRVKPMRLPVVVYRADSRGHVHKEEAPLATVYIEERDTKLLKQGNFKSFVKDRRLNGLFSFVDTGALAMEQYPISKLRVEYELAKYQTARVCAFEQTLELEESLLTRYPHLPDESFREMLESWSDPLLTKWPELHGKVRLLIAVRNAFSHNQYPMYDEAVFSSIWKYDPSSPDAIEERMGLNIAHRLSEEVKQAKETIERIIQA

SEQ ID NO: 393 - protein, 1174 aa, Porphyromonas gulae
MTEQSERPYNGTYYTLEDKHFWAAFLNLARHNAYITLTHIDRQLAYSKADITNDQDVLSFKALWKNLDNDLERKSRLRSLILKHFSFLEGAAYGKKLFESKSSGNKSSKNKELTKKEKEELQANALSLDNLKSILFDFLQKLKDFRNYYSHYRHSGSSELPLFDGNMLQRLYNVFDVSVQRVKRDHEHNDKVDPHYHFNHLVRKGKKDRYGHNDNPSFKHHFVDSEGMVTEAGLLFFVSLFLEKRDAIWMQKKIRGFKGGTGPYEQMTNEVFCRSRISLPKLKLESLRTDDWMLLDMLNELVRCPKPLYDRLREKDRACFRVPVDILPDEDDTDGGGEDPFKNTLVRHQDRFPYFALRYFDLKKVFTSLRFHIDLGTYHFAIYKKMIGEQPEDRHLTRNLYGFGRIQDFAEEHRPEEWKRLVRDLDYLETGDKPYISQTTPHYHIEKGKIGLRFVPEGQHLWPSPEVGTTRTGRSKCAQDKRLTAEAFLSVHELMPMMFYYFLLREKYSEEVSAEKVQGRIKRVIEDVYAIYDAFARDEINTLKELDTCLADKGIRRGHLPKQMITILSQERKDMKEKIRKKLQEMIADTDHRLDMLDRQTDRKIRIGRKNAGLPKSGVIADWLVRDMMRFQPVAKDASGKPLNNSKANSTEYRMLQRALALFGGEKERLTPYFRQMNLTGGNNPHPFLHETRWESHTNILSFYRSYLRARKAFLERIGRSDRVENCPFLLLKEPKTDRQTLVAGWKDEFHLPRGIFTEAVRDCLIEMGYDEVGSYREVGFMAKAVPLYFERACEDRVQPFYDSPFNVGNSLKPKKGRFLSKEDRAEEWERGMERFRDLEAWSHSAARRIKDAFAGIEYASPGNKKKIEQLLRDLSLWEAFESKLKVRADKINLAKLKKEILEAQEHPYHDFKSWQKFERELRLVKNQDIITWMMCRDLMEENKVEGLDTGTLYLKDIRPNVQEQGSLNVLNRVKPMRLPVVVYRADSRGHVHKEAPLATVYIEERNTKLLKQGNFKSFVKDRRLNGLFSFVDTGGLAMEQYPISKLRVEYELAKYQTARVCVFELTLRLEESLLSRYPHLPDESFREMLESWSDPLLAKWPELHGKVRLLIAVRNAFSHNQYPMYDEAVFSSIRKYDPSSPDAIEERMGLNIAHRLSEEVKQAKETVERIIQA

SEQ ID NO: 394 - protein, 1135 aa, Porphyromonas gulae
MNTVPATENKGQSRTVEDDPQYFGLYLNLARENLIEVESHVRIKFGKKKLNEESLKQSLLCDHLLSIDRWTKVYGHSRRYLPFLHCFDPDSGIEKDHDSKTGVDPDSAQRLIRELYSLLDFLRNDFSHNRLDGTTFEHLKVSPDISSFITGAYTFACERAQSRFADFFKPDDFLLAKNRKEQLISVADGKECLTVSGFAFFICLFLDREQASGMLSRIRGFKRTDENWARAVHETFCDLCIRHPHDRLESSNTKEALLLDMLNELNRCPRILYDMLPEEERAQFLPALDENSMNNLSENSLNEESRLLWDGSSDWAEALTKRIRHQDRFPYLMLRFIEEMDLLKGIRFRVDLGEIELDSYSKKVGRNGEYDRTITDHALAFGKLSDFQNEEEVSRMISGEASYPVRFSLFAPRYAIYDNKIGYCHTSDPVYPKSKTGEKRALSNPQSMGFISVHDLRKLLLMELLCEGSFSRMQSDFLRKANRILDETAEGKLQFSALFPEMRHRFIPPQNPKSKDRREKAETTLEKYKQEIKGRKDKLNSQLLSAFDMNQRQLPSRLLDEWMNIRPASHSVKLRTYVKQLNEDCRLRLRKFRKDGDGKARAIPLVGEMATFLSQDIVRMIISEETKKLITSAYYNEMQRSLAQYAGEENRRQFRAIVAELHLLDPSSGHPFLSATMETAHRYTEDFYKCYLEKKREWLAKTFYRPEQDENTKRRISVFFVPDGEARKLLPLLIRRRMKEQNDLQDWIRNKQAHPIDLPSHLFDSKIMELLKVKDGKKKWNEAFKDWWSTKYPDGMQPFYGLRRELNIHGKSVSYIPSDGKKFADCYTHLMEKTVRDKKRELRTAGKPVPPDLAAYIKRSFHRAVNEREFMLRLVQEDDRLMLMAINKMMTDREEDILPGLKNIDSILDEENQFSLAVHAKVLEKEGEGGDNSLSLVPATIEIKSKRKDWSKYIRYRYDRRVPGLMSHFPEHKATLDEVKTLLGEYDRCRIKIFDWAFALEGAIMSDRDLKPYLHESSSREGKSGEHSTLVKMLVEKKGCLTPDESQYLILIRNKAAHNQFPCAAEMPLIYRDVSAKVGSIEGSSAKDLPEGSSLVDSLWKKYEMIIRKILPILDHENRFFGKLLNNMSQPINDL

SEQ ID NO: 395 - protein, 1218 aa, Capnocytophaga cynodegmi
MENKTSLGNNIYYNPFKPQDKSYFAGYLNAAMENIDSVFRELGKRLKGKEYTSENFFDAIFKENISLVEYERYVKLLSDYFPMARLLDKKEVPIKERKENFKKNFRGIIKAVRDLRNFYTHKEHGEVEITDEIFGVLDEMLKSTVLTVKKKKIKTDKTKEILKKSIEKQLDILCQKKLEYLKDTARKIEEKRRNQRERGEKKLVPRFEYSDRRDDLIAAIYNDAFDVYIDKKKDSLKESSKTKYNTESYPQQEEGDLKIPISKNGVVFLLSLFLSKQEVHAFKSKIAGFKATVIDEATVSHRKNSICFMATHEIFSHLAYKKLKRKVRTAEINYSEAENAEQLSIYAKETLMMQMLDELSKVPDVVYQNLSEDVQKTFIEDWNEYLKENNGDVGTMEEEQVIHPVIRKRYEDKFNYFAIRFLDEFAQFPTLRFQVHLGNYLHDSRPKEHLISDRRIKEKITVFGRLSELEHKKALFIKNTETNEDRKHYWEVFPNPNYDFPKENISVNDKDFPIAGSILDREKQPTAGKIGIKVNLLNQKYISEVDKAVKAHQLKQRNNKPSIQNIIEEIVPINGSNPKEIIVFGGQPTAYLSMNDIHSILYEFFDKWEKKKEKLEKKGEKELRKEIGKELEEKIVGKIQTQIQQIIDKDINAKILKPYQDDDSTAIDKEKLIKDLKQEQKILQKLKNEQTAREKEYQECIAYQEESRKIKRSDKSRQKYLRNQLKRKYPEVPTRKEILYYQEKGKVAVWLANDIKRFMPTDFKNEWKGEQHSLLQKSLAYYEQCKEELKNLLPQQKVFKHLPFELGGHFQQKYLYQFYTRYLDKRLEHISGLVQQAENFKNENKVFKKVENECFKFLKKQNYTHKGLDAQAQSVLGYPIFLERGFMDEKPTIIKGKTFKGNESLFTDWFRYYKEYQNFQTFYDTENYPLVELEKKQADRKRETKIYQQKKNDVFTLLMAKHIFKSVFKQDSIDRFSLEDLYQSREERLENQEKAKQTGERNTNYIWNKTVDLNLCDGKVTVENVKLKNVGNFIKYEYDQRVQTFLKYEENIKWQAFLIKESKEEENYPYIVEREIEQYEKVRREELLKEVHLIEEYILEKVKDKEILKKGDNQNFKYYILNGLLKQLKNEDVESYKVFNLNTKPEDVNINQLKQEATDLEQKAFVLTYIRNKFAHNQLPKKEFWDYCQEKYGKIEKEKTYAEYFAEVFKREKEALMK

SEQ ID NO: 396 - protein, 1090 aa, Prevotella sp. P5-119
MNIPALVENQKKYFGTYSVMAMLNAQTVLDHIQKVADIEGEQNENNENLWFHPVMSHLYNAKNGYDKQPEKTMFIIERLQSYFPFLKIMAENQREYSNGKYKQNRVEVNSNDIFEVLKRAFGVLKMYRDLTNHYKTYEEKLIDGCEFLTSTEQPLSGMISKYYTVALRNTKERYGYKTEDLAFIQDNIKKITKDAYGKRKSQVNTGFFLSLQDYNGDTQKKLHLSGVGIALLICLFLDKQYINIFLSRLPIFSSYNAQSEERRIIIRSFGINSIKLPKDRIHSEKSNKSVAMDMLNEVKRCPDELFTTLSAEKQSRFRIISDDHNEVLMKRSTDRFVPLLLQYIDYGKLFDHIRFHVNMGKLRYLLKADKTCIDGQTRVRVIEQPLNGFGRLEEAETMRKQENGTFGNSGIRIRDFENVKRDDANPANYPYIVDTYTHYILENNKVEMFISDKGSSAPLLPLIEDDRYVVKTIPSCRMSTLEIPAMAFHMFLFGSKKTEKLIVDVHNRYKRLFQAMQKEEVTAENIASFGIAESDLPQKILDLISGNAHGKDVDAFIRLTVDDMLTDTERRIKRFKDDRKSIRSADNKMGKRGFKQISTGKLADFLAKDIVLFQPSVNDGENKITGLNYRIMQSAIAVYDSGDDYEAKQQFKLMFEKARLIGKGTTEPHPFLYKVFARSIPANAVDFYERYLIERKFYLTGLCNEIKRGNRVDVPFIRRDQNKWKTPAMKTLGRIYSEDLPVELPRQMFDNEIKSHLKSLPQMEGIDFNNANVTYLIAEYMKRVLNDDFQTFYQWKRNYHYMDMLKGEYDRKGSLQHCFTSVEEREGLWKERASRTERYRKLASNKIRSNRQMRNASSEEIETILDKRLSNCRNEYQKSEKVIRRYRVQDALLFLLAKKTLTELADFDGERFKLKEIMPDAEKGILSEIMPMSFTFEKGGKKYTITSEGMKLKNYGDFFVLASDKRIGNLLELVGSDIVSKEDIMEEFNKYDQCRPEISSIVFNLEKWAFDTYPELSARVDREEKVDFKSILKILLNNKNINKEQSDILRKIRNAFDHNNYPDKGIVEIKALPEIAMSIKKAFGEYAIMK

SEQ ID NO: 397 - protein, 1090 aa, Prevotella sp. P4-76
MNIPALVENQKKYFGTYSVMAMLNAQTVLDHIQKVADIEGEQNENNENLWFHPVMSHLYNAKNGYDKQPEKTMFIIERLQSYFPFLKIMAENQREYSNGKYKQNRVEVNSNDIFEVLKRAFGVLKMYRDQASHYKTYDEKLIDGCEFLTSTEQPLSGMINNYYTVALRNMNERYGYKTEDLAFIQDKRFKFVKDAYGKKKSQVNTGFFLSLQDYNGDTQKKLHLSGVGIALLICLFLDKQYINIFLSRLPIFSSYNAQSEERRIIIRSFGINSIKQPKDRIHSEKSNKSVAMDMLNEIKRCPNELFETLSAEKQSRFRIISNDHNEVLMKRSSDRFVPLLLQYIDYGKLFDHIRFHVNMGKLRYLLKADKTCIDGQTRVRVIEQPLNGFGRLEEVETMRKQENGTFGNSGIRIRDFENMKRDDANPANYPYIVDTYTHYILENNKVEMFISDEETPAPLLPVIEDDRYVVKTIPSCRMSTLEIPAMAFHMFLFGSKKTEKLIVDVHNRYKRLFKAMQKEEVTAENIASFGIAESDLPQKIIDLISGNAHGKDVDAFIRLTVDDMLADTERRIKRFKDDRKSIRSADNKMGKRGFKQISTGKLADFLAKDIVLFQPSVNDGENKITGLNYRIMQSAIAVYNSGDDYEAKQQFKLMFEKARLIGKGTTEPHPFLYKVFVRSIPANAVDFYERYLIERKFYLIGLSNEIKKGNRVDVPFIRRDQNKWKTPAMKTLGRIYDEDLPVELPRQMFDNEIKSHLKSLPQMEGIDFNNANVTYLIAEYMKRVLNDDFQTFYQWKRNYRYMDMLRGEYDRKGSLQSCFTSVEEREGLWKERASRTERYRKLASNKIRSNRQMRNASSEEIETILDKRLSNSRNEYQKSEKVIRRYRVQDALLFLLAKKTLTELADFDGERFKLKEIMPDAEKGILSEIMPMSFTFEKGGKKYTITSEGMKLKNYGDFFVLASDKRIGNLLELVGSDTVSKEDIMEEFKKYDQCRPEISSIVFNLEKWAFDTYPELSARVDREEKVDFKSILKILLNNKNINKEQSDILRKIRNAFDHNNYPDKGVVEIRALPEIAMSIKKAFGEYAIMK

SEQ ID NO: 398 - protein, 1090 aa, Prevotella sp. P5-60
MNIPALVENQKKYFGTYSVMAMLNAQTVLDHIQKVADIEGEQNENNENLWFHPVMSHLYNAKNGYDKQPEKTMFIIERLQSYFPFLKIMAENQREYSNGKYKQNRVEVNSNDIFEVLKRAFGVLKMYRDLTNHYKTYEEKLIDGCEFLTSTEQPFSGMISKYYTVALRNTKERYGYKAEDLAFIQDNRYKFTKDAYGKRKSQVNTGSFLSLQDYNGDTTKKLHLSGVGIALLICLFLDKQYINLFLSRLPIFSSYNAQSEERRIIIRSFGINSIKQPKDRIHSEKSNKSVAMDMLNEVKRCPDELFTTLSAEKQSRFRIISDDHNEVLMKRSSDRFVPLLLQYIDYGKLFDHIRFHVNMGKLRYLLKADKTCIDGQTRVRVIEQPLNGFGRLEEVETMRKQENGTFGNSGIRIRDFENMKRDDANPANYPYIVETYTHYILENNKVEMFISDEENPTPLLPVIEDDRYVVKTIPSCRMSTLEIPAMAFHMFLFGSEKTEKLIIDVHDRYKRLFQAMQKEEVTAENIASFGIAESDLPQKIMDLISGNAHGKDVDAFIRLTVDDMLTDTERRIKRFKDDRKSIRSADNKMGKRGFKQISTGKLADFLAKDIVLFQPSVNDGENKITGLNYRIMQSAIAVYDSGDDYEAKQQFKLMFEKARLIGKGTTEPHPFLYKVFVRSIPANAVDFYERYLIERKFYLIGLSNEIKKGNRVDVPFIRRDQNKWKTPAMKTLGRIYSEDLPVELPRQMFDNEIKSHLKSLPQMEGIDFNNANVTYLIAEYMKRVLNDDFQTFYQWKRNYRYMDMLRGEYDRKGSLQHCFTSIEEREGLWKERASRTERYRKLASNKIRSNRQMRNASSEEIETILDKRLSNCRNEYQKSEKIIRRYRVQDALLFLLAKKTLTELADFDGERFKLKEIMPDAEKGILSEIMPMSFTFEKGGKIYTITSGGMKLKNYGDFFVLASDKRIGNLLELVGSNTVSKEDIMEEFKKYDQCRPEISSIVFNLEKWAFDTYPELPARVDRKEKVDFWSILDVLSNNKDINNEQSYILRKIRNAFDHNNYPDKGIVEIKALPEIAMSIKKAFGEYAIMK

SEQ ID NO: 399 - protein, 1131 aa, Phaeodactylibacter xiamenensis
MTNTPKRRTLHRHPSYFGAFLNIARHNAFMIMEHLSTKYDMEDKNTLDEAQLPNAKLFGCLKKRYGKPDVTEGVSRDLRRYFPFLNYPLFLHLEKQQNAEQAATYDINPEDIEFTLKGFFRLLNQMRNNYSHYISNTDYGKFDKLPVQDIYEAAIFRLLDRGKHTKRFDVFESKHTRHLESNNSEYRPRSLANSPDHENTVAFVTCLFLERKYAFPFLSRLDCFRSTNDAAEGDPLIRKASHECYTMFCCRLPQPKLESSDILLDMVNELGRCPSALYNLLSEEDQARFHIKREEITGFEEDPDEELEQEIVLKRHSDRFPYFALRYFDDTEAFQTLRFDVYLGRWRTKPVYKKRIYGQERDRVLTQSIRTFTRLSRLLPIYENVKHDAVRQNEEDGKLVNPDVTSQFHKSWIQIESDDRAFLSDRIEHFSPHYNFGDQVIGLKFINPDRYAAIQNVFPKLPGEEKKDKDAKLVNETADAIISTHEIRSLFLYHYLSKKPISAGDERRFIQVDTETFIKQYIDTIKLFFEDIKSGELQPIADPPNYQKNEPLPYVRGDKEKTQEERAQYRERQKEIKERRKELNTLLQNRYGLSIQYIPSRLREYLLGYKKVPYEKLALQKLRAQRKEVKKRIKDIEKMRTPRVGEQATWLAEDIVFLTPPKMHTPERKTTKHPQKLNNDQFRIMQSSLAYFSVNKKAIKKFFQKETGIGLSNRETSHPFLYRIDVGRCRGILDFYTGYLKYKMDWLDDAIKKVDNRKHGKKEAKKYEKYLPSSIQHKTPLELDYTRLPVYLPRGLFKKAIVKALAAHADFQVEPEEDNVIFCLDQLLDGDTQDFYNWQRYYRSALTEKETDNQLVLAHPYAEQILGTIKTLEGKQKNNKLGNKAKQKIKDELIDLKRAKRRLLDREQYLRAVQAEDRALWLMIQERQKQKAEHEEIAFDQLDLKNITKILTESIDARLRIPDTKVDITDKLPLRRYGDLRRVAKDRRLVNLASYYHVAGLSEIPYDLVKKELEEYDRRRVAFFEHVYQFEKEVYDRYAAELRNENPKGESTYFSHWEYVAVAVKHSADTHFNELFKEKVMQLRNKFHHNEFPYFDWLLPEVEKASAALYADRVFDVAEGYYQKMRKLMRQ

SEQ ID NO: 400 - protein, 1155 aa, Flavobacterium sp. 316
MDNNITVEKTELGLGITYNHDKVEDKHYFGGFFNLAQNNIDLVAQEFKKRLLIQGKDSINIFANYFSDQCSITNLERGIKILAEYFPVVSYIDLDEKNKSKSIREHLILLLETINNLRNYYTHYYHKKIIIDGSLFPLLDTILLKVVLEIKKKKLKEDKTKQLLKKGLEKEMTILFNLMKAEQKEKKIKGWNIDENIKGAVLNRAFSHLLYNDELSDYRKSKYNTEDETLKDTLTESGILFLLSFFLNKKEQEQLKANIKGYKGKIASIPDEEITLKNNSLRNMATHWTYSHLTYKGLKHRIKTDHEKETLLVNMVDYLSKVPHEIYQNLSEQNKSLFLEDINEYMRDNEENHDSSEASRVIHPVIRKRYENKFAYFAIRFLDEFAEFPTLRFMVNVGNYIHDNRKKDIGGTSLITNRTIKQQINVFGNLTEIHKKKNDYFEKEENKEKTLEWELFPNPSYHFQKENIPIFIDLEKSKETNDLAKEYAKEKKKIFGSSRKKQQNTAKKNRETIINLVFDKYKTSDRKTVTFEQPTALLSFNELNSFLYAFLVENKTGKELEKIIIEKIANQYQILKNCSSTVDKTNDNIPKSIKKIVNTTTDSFYFEGKKIDIEKLEKDITIEIEKTNEKLETIKENEESAQNYKRNERNTQKRKLYRKYVFFTNEIGIEATWITNDILRFLDNKENWKGYQHSELQKFISQYDNYKKEALGLLESEWNLESDAFFGQNLKRMFQSNSTFETFYKKYLDNRKNTLETYLSAIENLKTMTDVRPKVLKKKWTELFRFFDKKIYLLSTIETKINELITKPINLSRGIFEEKPTFINGKNPNKENNQHLFANWFIYAKKQTILQDFYNLPLEQPKAITNLKKHKYKLERSINNLKIEDIYIKQMVDFLYQKLFEQSFIGSLQDLYTSKEKREIEKGKAKNEQTPDESFIWKKQVEINTHNGRIIAKTKIKDIGKFKNLLTDNKIAHLISYDDRIWDFSLNNDGDITKKLYSINTELESYETIRREKLLKQIQQFEQFLLEQETEYSAERKHPEKFEKDCNPNFKKYIIEGVLNKIIPNHEIEEIEILKSKEDVFKINFSDILILNNDNIKKGYLLIMIRNKFAHNQLIDKNLFNFSLQLYSKNENENFSEYLNKVCQNIIQEFKEKLK

SEQ ID NO: 401 - protein, 1175 aa, Porphyromonas gulae
MTEQSERPYNGTYYTLEDKHFWAAFLNLARHNAYITLTHIDRQLAYSKADITNDQDVLSFKALWKNFDNDLERKSRLRSLILKHFSFLEGAAYGKKLFESKSSGNKSSKNKELTKKEKEELQANALSLDNLKSILFDFLQKLKDFRNYYSHYRHSESSELPLFDGNMLQRLYNVFDVSVQRVKRDHEHNDKVDPHRHFNHLVRKGKKDRYGHNDNPSFKHHFVDSEGMVTEAGLLFFVSLFLEKRDAIWMQKKIRGFKGGTETYQQMTNEVFCRSRISLPKLKLESLRTDDWMLLDMLNELVRCPKPLYDRLREKDRARFRVPVDILPDEDDTDGGGEDPFKNTLVRHQDRFPYFALRYFDLKKVFTSLRFHIDLGTYHFAIYKKMIGEQPEDRHLTRNLYGFGRIQDFAEEHRPEEWKRLVRDLDYFETGDKPYISQTTPHYHIEKGKIGLRFMPEGQHLWPSPEVGTTRTGRSKYAQDKRLTAEAFLSVHELMPMMFYYFLLREKYSEEVSAEKVQGRIKRVIEDVYAIYDAFARDEINTLKELDACLADKGIRRGHLPKQMIAILSQEHKDMEEKIRKKLQEMIADTDHRLDMLDRQTDRKIRIGRKNAGLPKSGVIADWLVRDMMRFQPVAKDTSGKPLNNSKANSTEYRMLQRALALFGGEKKRLTPYFRQMNLTGGNNPHPFLHETRWESHTNILSFYRSYLRARKAFLERIGRSDRMENRPFLLLKEPKTDRQTLVAGWKSEFHLPRGIFTEAVRDCLIEMGYDEVGSYREVGFMAKAVPLYFERACEDRVQPFYDSPFNVGNSLKPKKGRFLSKEERAEEWERGKERFRDLEAWSHSAARRIEDAFAGIEYASPGNKKKIEQLLRDLSLWEAFESKLKVRADKINLAKLKKEILEAQEHPYHDFKSWQKFERELRLVKNQDIITWMMCRDLMEENKVEGLDTGTLYLKDIRPNVQEQGSLNVLNRVKPMRLPVVVYRADSRGHVHKEEAPLATVYIEERDTKLLKQGNFKSFVKDRRLNGLFSFVDTGGLAMEQYPISKLRVEYELAKYQTARVCVFELTLRLEESLLTRYPHLPDESFRKMLESWSDPLLAKWPELHGKVRLLIAVRNAFSHNQYPMYDEAVFSSIRKYDPSSPDAIEERMGLNIAHRLSEEVKQAKETVERIIQV

SEQ ID NO: 402 - protein, 1145 aa, Chryseobacterium sp. YR477
METQTIGHGIAYDHSKIQDKHFFGGFLNLAENNIKAVLKAFSEKFNVGNVDVKQFADVSLKDNLPDNDFQKRVSFLKMYFPVVDFINIPNNRAKFRSDLTTLFKSVDQLRNFYTHYYHKPLDFDASLFILLDDIFARTAKEVRDQKMKDDKTRQLLSKSLSEELQKGYELQLERLKELNRLGKKVNIHDQLGIKNGVLNNAFNHLIYKDGESFKTKLTYSSALTSFESAENGIEISQSGLLFLLSMFLKRKEIEDLKNRNKGFKAKVVIDEDGKVNGLKFMATHWVFSYLCFKGLKSKLSTEFHEETLLIQIIDELSKVPDELYCAFDKETRDKFIEDINEYVKEGHQDFSLEDAKVIHPVIRKRYENKFNYFAIRFLDEFVKFPSLRFQVHVGNYVHDRRIKNIDGTTFETERVVKDRIKVFGRLSEISSYKAQYLSSVSDKHDETGWEIFPNPSYVFINNNIPIHISVDTSFKKEIADFKKLRRAQVPDELKIRGAEKKRKFEITQMIGSKSVLNQEEPIALLSLNEIPALLYEILINGKEPAEIERIIKDKLNERQDVIKNYNPENWLPASQISRRLRSNKGERIINTDKLLQLVTKELLVTEQKLKIISDNREALKQKKEGKYIRKFIFTNSELGREAIWLADDIKRFMPADVRKEWKGYQHSQLQQSLAFYNSRPKEALAILESSWNLKDEKIIWNEWILKSFTQNKFFDAFYNEYLKGRKKYFAFLSEHIVQYTSNAKNLQKFIKQQMPKDLFEKRHYIIEDLQTEKNKILSKPFIFPRGIFDKKPTFIKGVKVEDSPESFANWYQYGYQKDHQFQKFYDWKRDYSDVFLEHLGKPFINNGDRRTLGMEELKERIIIKQDLKIKKIKIQDLFLRLIAENLFQKVFKYSAKLPLSDFYLTQEERMEKENMAALQNVREEGDKSPNIIKDNFIWSKMIPYKKGQIIENAVKLKDIGKLNVLSLDDKVQTLLSYDDAKPWSKIALENEFSIGENSYEVIRREKLFKEIQQFESEILFRSGWDGINHPAQLEDNRNPKFKMYIVNGILRKSAGLYSQGEDIWFEYNADFNNLDADVLETKSELVQLAFLVTAIRNKFAHNQLPAKEFYFYIRAKYGFADEPSVALVYLNFTKYAINEFKKVMI

SEQ ID NO: 403 - protein, 948 aa, Riemerella anatipestifer
MFFSFHNAQRVIFKHLYKAFDASLRMVKEDYKAHFTVNLTRDFAHLNRKGKNKQDNPDFNRYRFEKDGFFTESGLLFFTNLFLDKRDAYWMLKKVSGFKASHKQREKMTTEVFCRSRILLPKLRLESRYDHNQMLLDMLSELSRCPKLLYEKLSEENKKHFQVEADGFLDEIEEEQNPFKDTLIRHQDRFPYFALRYLDLNESFKSIRFQVDLGTYHYCIYDKKIGDEQEKRHLTRTLLSFGRLQDFTEINRPQEWKALTKDLDYKETSNQPFISKTTPHYHITDNKIGFRLGTSKELYPSLEIKDGANRIAKYPYNSGFVAHAFISVHELLPLMFYQHLTGKSEDLLKETVRHIQRIYKDFEEERINTIEDLEKANQGRLPLGAFPKQMLGLLQNKQPDLSEKAKIKIEKLIAETKLLSHRLNTKLKSSPKLGKRREKLIKTGVLADWLVKDFMRFQPVAYDAQNQPIKSSKANSTEFWFIRRALALYGGEKNRLEGYFKQTNLIGNTNPHPFLNKFNWKACRNLVDFYQQYLEQREKFLEAIKNQPWEPYQYCLLLKIPKENRKNLVKGWEQGGISLPRGLFTEAIRETLSEDLMLSKPIRKEIKKHGRVGFISRAITLYFKEKYQDKHQSFYNLSYKLEAKAPLLKREEHYEYWQQNKPQSPTESQRLELHTSDRWKDYLLYKRWQHLEKKLRLYRNQDVMLWLMTLELTKNHFKELNLNYHQLKLENLAVNVQEADAKLNPLNQTLPMVLPVKVYPATAFGEVQYHKTPIRTVYIREEHTKALKMGNFKALVKDRRLNGLFSFIKEENDTQKHPISQLRLRRELEIYQSLRVDAFKETLSLEEKLLNKHTSLSSLENEFRALLEEWKKEYAASSMVTDEHIAFIASVRNAFCHNQYPFYKEALHAPIPLFTVAQPTTEEKDGLGIAEALLKVLREYCEIVKSQI

SEQ ID NO: 404 - protein, 1175 aa, Porphyromonas gingivalis
MTEQNEKPYNGTYYTLEDKHFWAAFFNLARHNAYITLAHIDRQLAYSKADITNDEDILFFKGQWKNLDNDLERKARLRSLILKHFSFLEGAAYGKKLFESQSSGNKSSKKKELTKKEKEELQANALSLDNLKSILFDFLQKLKDFRNYYSHYRHPESSELPLFDGNMLQRLYNVFDVSVQRVKRDHEHNDKVDPHRHFNHLVRKGKKDKYGNNDNPFFKHHFVDREEKVTEAGLLFFVSLFLEKRDAIWMQKKIRGFKGGTEAYQQMTNEVFCRSRISLPKLKLESLRTDDWMLLDMLNELVRCPKLLYDRLREEDRARFRVPVDILSDEDDTDGTEEDPFKNTLVRHQDRFPYFALRYFDLKKVFTSLRFHIDLGTYHFAIYKKNIGEQPEDRHLTRNLYGFGRIQDFAEEHRPEEWKRLVRDLDYFETGDKPYITQTTPHYHIEKGKIGLRFVPEGQLLWPSPEVGATRTGRSKYAQDKRFTAEAFLSVHELMPMMFYYFLLREKYSEEASAEKVQGRIKRVIEDVYAVYDAFARDEINTRDELDACLADKGIRRGHLPRQMIAILSQEHKDMEEKVRKKLQEMIADTDHRLDMLDRQTDRKIRIGRKNAGLPKSGVIADWLVRDMMRFQPVAKDTSGKPLNNSKANSTEYRMLQRALALFGGEKERLTPYFRQMNLTGGNNPHPFLHETRWESHTNILSFYRSYLKARKAFLQSIGRSDREENHRFLLLKEPKTDRQTLVAGWKSEFHLPRGIFTEAVRDCLIEMGYDEVGSYKEVGFMAKAVPLYFERACKDRVQPFYDYPFNVGNSLKPKKGRFLSKEKRAEEWESGKERFRDLEAWSHSAARRIEDAFVGIEYASWENKKKIEQLLQDLSLWETFESKLKVKADKINIAKLKKEILEAKEHPYHDFKSWQKFERELRLVKNQDIITWMMCRDLMEENKVEGLDTGTLYLKDIRTDVQEQGSLNVLNHVKPMRLPVVVYRADSRGHVHKEEAPLATVYIEERDTKLLKQGNFKSFVKDRRLNGLFSFVDTGALAMEQYPISKLRVEYELAKYQTARVCAFEQTLELEESLLTRYPHLPDESFREMLESWSDPLLDKWPDLQREVRLLIAVRNAFSHNQYPMYDETIFSSIRKYDPSSLDAIEERMGLNIAHRLSEEVKLAKEMVERIIQA

SEQ ID NO: 405 - protein, 1175 aa, Porphyromonas gingivalis
MTEQNEKPYNGTYYTLKDKHFWAAFFNLARHNAYITLTHIDRQLAYSKADITNDEDILFFKGQWKNLDNDLERKARLRSLILKHFSFLEGAAYGKKLFESQSSGNKSSKKKELTKKEKEELQANALSLDNLKSILFDFLQKLKDFRNYYSHYRHPESSELPMFDGNMLQRLYNVFDVSVQRVKRDHEHNDKVDPHRHFNHLVRKGKKDRCGNNDNPFFKHHFVDREGKVTEAGLLFFVSLFLEKRDAIWMQKKIRGFKGGTETYQQMTNEVFCRSRISLPKLKLESLRTDDWMLLDMLNELVRCPKSLYDRLREEDRACFRVPVDILSDEDDTDGAEEDPFKNTLVRHQDRFPYFALRYFDLKKVFTSLRFHIDLGTYHFAIYKKNIGEQPEDRHLTRNLYGFGRIQDFAEEHRPEEWKRLVRDLDCFETGDKPYITQTTPHYHIEKGKIGLRFVPEGQHLWPSPEVGATRTGRSKYAQDKRFTAEAFLSVHELMPMMFYYFLLREKYSEEVSAERVQGRIKRVIEDVYAVYDAFARDEINTRDELDACLADKGIRRGHLPRQMIAILSQKHKDMEEKVRKKLQEMIADTDHRLDMLDRQTDRKIRIGRKNAGLPKSGVIADWLVRDMMRFQPVAKDTSGKPLNNSKANSTEYRMLQRALALFGGEKERLTPYFRQMNLTGGNNPHPFLHETRWESHTNILSFYRSYLKARKAFLQSIGRSDRVENHRFLLLKEPKTDRQTLVAGWKGEFHLPRGIFTEAVRDCLIEMGLDEVGSYKEVGFMAKAVPLYFERACKDRVQPFYDYPFNVGNSLKPKKGRFLSKEKRAEEWESGKERFRDLEAWSHSAARRIEDAFAGIENASRENKKKIEQLLQDLSLWETFESKLKVKADKINIAKLKKEILEAKEHPYLDFKSWQKFERELRLVKNQDIITWMMCRDLMEENKVEGLDTGTLYLKDIRTDVQEQGSLNVLNHVKPMRLPVVVYRADSRGHVHKEQAPLATVYIEERDTKLLKQGNFKSFVKDRRLNGLFSFVDTGALAMEQYPISKLRVEYELAKYQTARVCAFEQTLELEESLLTRYPHLPDENFRKMLESWSDPLLDKWPDLHRKVRLLIAVRNAFSHNQYPMYDEAVFSSIRKYDPSSPDAIEERMGLNIAHRLSEEVKQAKEMAERIIQA

SEQ ID NO: 406 - protein, 1213 aa, Flavobacterium columnare
MSSKNESYNKQKTFNHYKQEDKYFFGGFLNNADDNLRQVGKEFKTRINFNHNNNELASVFKDYFNKEKSVAKREHALNLLSNYFPVLERIQKHTNHNFEQTREIFELLLDTIKKLRDYYTHHYHKPITINPKVYDFLDDTLLDVLITIKKKKVKNDTSRELLKEKFRPELTQLKNQKREELIKKGKKLLEENLENAVFNHCLRPFLEENKTDDKQNKTVSLRKYRKSKPNEETSITLTQSGLVFLISFFLHRKEFQVFTSGLEGFKAKVNTIKEEEISLNKNNIVYMITHWSYSYYNFKGLKHRIKTDQGVSTLEQNNTTHSLTNTNTKEALLTQIVDYLSKVPNEIYETLSEKQQKEFEEDINEYMRENPENEDSTFSSIVSHKVIRKRYENKFNYFAMRFLDEYAELPTLRFMVNFGDYIKDRQKKILESIQFDSERIIKKEIHLFEKLGLVTEYKKNVYLKETSNIDLSRFPLFPSPSYVMANNNIPFYIDSRSNNLDEYLNQKKKAQSQNRKRNLTFEKYNKEQSKDAIIAMLQKEIGVKDLQQRSTIGLLSCNELPSMLYEVIVKDIKGAELENKIAQKIREQYQSIRDFTLDSPQKDNIPTTLTKTISTDTSVTFENQPIDIPRLKNALQKELTLTQEKLLNVKQHEIEVDNYNRNKNTYKFKNQPKDKVDDNKLQRKYVFYRNEIGQEANWLASDLIHFMKNKSLWKGYMHNELQSFLAFFEDKKNDCIALLETVFNLKEDCILTKDLKNLFLKHGNFIDFYKEYLKLKEDFLNTESTFLENGFIGLPPKILKKELSKRLNYIFIVFQKRQFIIKELEEKKNNLYADAINLSRGIFDEKPTMIPFKKPNPDEFASWFVASYQYNNYQSFYELTPDKIENDKKKKYKNLRAINKVKIQDYYLKLMVDTLYQDLFNQPLDKSLSDFYVSKTDREKIKADAKAYQKRNDSFLWNKVIHLSLQNNRITANPKLKDIGKYKRALQDEKIATLLTYDDRTWTYALQKPEKENENDYKELHYTALNMELQEYEKVRSKKLLKQVQELEKQILDKFYDFSNNATHPEDLEIEDKKGKRHPNFKLYITKALLKNESEIINLENIDIEILIKYYDYNTEKLKEKIKNMDEDEKAKIVNTKENYNKITNVLIKKALVLIIIRNKMAHNQYPPKFIYDLATRFVPKKEEEYFACYFNRVFETITTELWENKKKAKEIV

SEQ ID NO: 407 - protein, 1119 aa, Porphyromonas gingivalis
MTEQNERPYNGTYYTLEDKHFWAAFFNLARHNAYITLTHIDRQLAYSKADITNDEDILFFKGQWKNLDNDLERKARLRSLILKHFSFLEGAAYGKKLFENKSSGNKSSKKKELTKKEKEELQANALSLDNLKSILFDFLQKLKDFRNYYSHYRHPESSELPLFDGNMLQRLYNVFDVSVQRVKRDHEHNDKVDPHRHFNHLVRKGKKDRCGNNDNPFFKHHFVDREGKVTEAGLLFFVSLFLEKRDAIWMQKKIRGFKGGTEAYQQMTNEVFCRSRISLPKLKLESLRTDDWMLLDMLNELVRCPKSLYDRLREEDRARFRVPVDILSDEDDTDGTEEDPFKNTLVRHQDRFPYFALRYFDLKKVFTSLRFHIDLGTYHFAIYKKNIGEQPEDRHLTRNLYGFGRIQDFAEEHRPEEWKRLVRDLDYFETGDKPYITQTTPHYHIEKGKIGLRFVPEGQHLWPSPEVGATRTGRSKYAQDKRLTAEAFLSVHELMPMMFYYFLLREKYSEEVSAEKVQGRIKRVIEDVYAVYDAFARGEIDTLDRLDACLADKGIRRGHLPRQMIAILSQEHKDMEEKVRKKLQEMIADTDHRLDMLDRQTDRKIRIGRKNAGLPKSGVIADWLVRDMMRFQPVAKDTSGKPLNNSKANSTEYRMLQRALALFGGEKERLTPYFRQMNLTGGNNPHPFLHETRWESHTNILSFYRSYLKARKAFLQSIGRSDREENHRFLLLKEPKTDRQTLVAGWKSEFHLPRGIFTEAVRDCLIEMGYDEVGSYKEVGFMAKAVPLYFERACKDRVQPFYDYPFNVGNSLKPKKGRFLSKEKRAEEWESGKERFRLAKLKKEILEAKEHPYLDFKSWQKFERELRLVKNQDIITWMMCRDLMEENKVEGLDTGTLYLKDIRTEVQEQGSLNVLNRVKPMRLPVVVYRADSRGHVHKEQAPLATVYIEERDTKLLKQGNFKSFVKDRRLNGLFSFVDTGGLAMEQYPISKLRVEYELAKYQTARVCAFEQTLELEESLLTRCPHLPDKNFRKMLESWSDPLLDKWPDLQREVWLLIAVRNAFSHNQYPMYDEAVFSSIRKYDPSSPDAIEERMGLNIAHRLSEEVKQAKEMAERIIQA

SEQ ID NO: 408 - protein, 1135 aa, Porphyromonas gingivalis
MNTVPASENKGQSRTVEDDPQYFGLYLNLARENLIEVESHVRIKFGKKKLNEESLKQSLLCDHLLSVDRWTKVYGHSRRYLPFLHYFDPDSQIEKDHDSKTGVDPDSAQRLIRELYSLLDFLRNDFSHNRLDGTTFEHLEVSPDISSFITGTYSLACGRAQSRFADFFKPDDFVLAKNRKEQLISVADGKECLTVSGLAFFICLFLDREQASGMLSRIRGFKRTDENWARAVHETFCDLCIRHPHDRLESSNTKEALLLDMLNELNRCPRILYDMLPEEERAQFLPALDENSMNNLSENSLNEESRLLWDGSSDWAEALTKRIRHQDRFPYLMLRFIEEMDLLKGIRFRVDLGEIELDSYSKKVGRNGEYDRTITDHALAFGKLSDFQNEEEVSRMISGEASYPVRFSLFAPRYAIYDNKIGYCHTSDPVYPKSKTGEKRALSNPQSMGFISVHDLRKLLLMELLCEGSFSRMQSGFLRKANRILDETAEGKLQFSALFPEMRHRFIPPQNPKSKDRREKAETTLEKYKQEIKGRKDKLNSQLLSAFDMNQRQLPSRLLDEWMNIRPASHSVKLRTYVKQLNEDCRLRLRKFRKDGDGKARAIPLVGEMATFLSQDIVRMIISEETKKLITSAYYNEMQRSLAQYAGEENRRQFRAIVAELHLLDPSSGHPFLSATMETAHRYTEDFYKCYLEKKREWLAKTFYRPEQDENTKRRISVFFVPDGEARKLLPLLIRRRMKEQNDLQDWIRNKQAHPIDLPSHLFDSKIMELLKVKDGKKKWNEAFKDWWSTKYPDGMQPFYGLRRELNIHGKSVSYIPSDGKKFADCYTHLMEKTVQDKKRELRTAGKPVPPDLAADIKRSFHRAVNEREFMLRLVQEDDRLMLMAINKMMTDREEDILPGLKNIDSILDKENQFSLAVHAKVLEKEGEGGDNSLSLVPATIEIKSKRKDWSKYIRYRYDRRVPGLMSHFPEHKATLDEVKTLLGEYDRCRIKIFDWAFALEGAIMSDRDLKPYLHESSSREGKSGEHSTLVKMLVEKKGCLTPDESQYLILIRNKAAHNQFPCAAEMPLIYRDVSAKVGSIEGSSAKDLPEGSSLVDSLWKKYEMIIRKILPILDPENRFFGKLLNNMSQPINDL

SEQ ID NO: 409 - protein, 950 aa, Rimerella anatipestifer
MFFSFHNAQRVIFKHLYKAFDASLRMVKEDYKAHFTVNLTRDFAHLNRKGKNKQDNPDFNRYRFEKDGFFTESGLLFFTNLFLDKRDAYWMLKKVSGFKASHKQSEKMTTEVFCRSRILLPKLRLESRYDHNQMLLDMLSELSRCPKLLYEKLSEKDKKCFQVEADGFLDEIEEEQNPFKDTLIRHQDRFPYFALRYLDLNESFKSIRFQVDLGTYHYCIYDKKIGYEQEKRHLTRTLLNFGRLQDFTEINRPQEWKALTKDLDYNETSNQPFISKTTPHYHITDNKIGFRLRTSKELYPSLEVKDGANRIAKYPYNSDFVAHAFISISVHELLPLMFYQHLTGKSEDLLKETVRHIQRIYKDFEEERINTIEDLEKANQGRLPLGAFPKQMLGLLQNKQPDLSEKAKIKIEKLIAETKLLSHRLNTKLKSSPKLGKRREKLIKTGVLADWLVKDFMRFQPVVYDAQNQPIKSSKANSTESRLIRRALALYGGEKNRLEGYFKQTNLIGNTNPHPFLNKFNWKACRNLVDFYQQYLEQREKFLEAIKHQPWEPYQYCLLLKVPKENRKNLVKGWEQGGISLPRGLFTEAIRETLSKDLTLSKPIRKEIKKHGRVGFISRAITLYFKEKYQDKHQSFYNLSYKLEAKAPLLKKEEHYEYWQQNKPQSPTESQRLELHTSDRWKDYLLYKRWQHLEKKLRLYRNQDIMLWLMTLELTKNHFKELNLNYHQLKLENLAVNVQEADAKLNPLNQTLPMVLPVKVYPTTAFGEVQYHETPIRTVYIREEQTKALKMGNFKALVKDRHLNGLFSFIKEENDTQKHPISQLRLRRELEIYQSLRVDAFKETLSLEEKLLNKHASLSSLENEFRTLLEEWKKKYAASSMVTDKHIAFIASVRNAFCHNQYPFYKETLHAPILLFTVAQPTTEEKDGLGIAEALLRVLREYCEIVKSQI

SEQ ID NO: 410 - protein, 1213 aa, Flavobacterium columnare
MSSKNESYNKQKTFNHYKQEDKYFFGGFLNNADDNLRQVGKEFKTRINFNHNNNELASVFKDYFNKEKSVAKREHALNLLSNYFPVLERIQKHTNHNFEQTREIFELLLDTIKKLRDYYTHHYHKPITINPKIYDFLDDTLLDVLITIKKKKVKNDTSRELLKEKLRPELTQLKNQKREELIKKGKKLLEENLENAVFNHCLRPFLEENKTDDKQNKTVSLRKYRKSKPNEETSITLTQSGLVFLMSFFLHRKEFQVFTSGLEGFKAKVNTIKEEKISLNKNNIVYMITHWSYSYYNFKGLKHRIKTDQGVSTLEQNNTTHSLTNTNTKEALLTQIVDYLSKVPNEIYETLSEKQQKEFEEDINEYMRENPENEDSTFSSIVSHKVIRKRYENKFNYFAMRFLDEYAELPTLRFMVNFGDYIKDRQKKILESIQFDSERIIKKEIHLFEKLGLVTEYKKNVYLKETSNIDLSRFPLFPSPSYVMANNNIPFYIDSRSNNLDEYLNQKKKAQSQNRKRNLTFEKYNKEQSKDAIIAMLQKEIGVKDLQQRSTIGLLSCNELPSMLYEVIVKDIKGAELENKIAQKIREQYQSIRDFTLNSPQKDNIPTTLIKTISTDTSVTFENQPIDIPRLKNAIQKELALTQEKLLNVKQHEIEVNNYNRNKNTYKFKNQPKDKVDDNKLQRKYVFYRNEIGQEANWLASDLIHFMKNKSLWKGYMHNELQSFLAFFEDKKNDCIALLETVFNLKEDCILTKDLKNLFLKHGNFIDFYKEYLKLKEDFLNTESTFLENGFIGLPPKILKKELSKRLNYIFIVFQKRQFIIKELEEKKNNLYADAINLSRGIFDEKPTMIPFKKPNPDEFASWFVASYQYNNYQSFYELTPDKIENDKKKKYKNLRAINKVKIQDYYLKLMVDTLYQDLFNQPLDKSLSDFYVSKTDREKIKADAKAYQKRNDSFLWNKVIHLSLQNNRITANPKLKDIGKYKRALQDEKIATLLTYDDRTWTYALQKPEKENENDYKELHYTALNMELQEYEKVRSKKLLKQVQELEKQILDKFYDFSNNATHPEDLEIEDKKGKRHPNFKLYITKALLKNESEIINLENIDIEILIKYYDYNTEKLKEKIKNMDEDEKAKIVNTKENYNKITNVLIKKALVLIIIRNKMAHNQYPPKFIYDLATRFVPKKEEEYFACYFNRVFETITTELWENKKKAKEIV

SEQ ID NO: 411 - protein, 1095 aa, Riemerella anatispestifer
MEKPLPPNVYTLKHKFFWGAFLNIARHNAFITICHINEQLGLTTPPNDDKIADVVCGTWNNILNNDHDLLKKSQLTELILKHFPFLAAMCYHPPKKEGKKKGSQKEQQKEKENEAQSQAEALNPSELIKVLKTLVKQLRTLRNYYSHHSHKKPDAEKDIFKHLYKAFDASLRMVKEDYKAHFTVNLTQDFAHLNRKGKNKQDNPDFDRYRFEKDGFFTESGLLFFTNLFLDKRDAYWMLKKVSGFKASHKQSEKMTTEVFCRSRILLPKLRLESRYDHNQMLLDMLSELSRYPKLLYEKLSEEDKKRFQVEADGFLDEIEEEQNPFKDTLIRHQDRFPYFALRYLDLNESFKSIRFQVDLGTYHYCIYDKKIGDEQEKRHLTRTLLSFGRLQDFTEINRPQEWKALTKDLDYKETSKQPFISKTTPHYHITDNKIGFRLGTSKELYPSLEVKDGANRIAQYPYNSDFVAHAFISVHELLPLMFYQHLTGKSEDLLKETVRHIQRIYKDFEEERINTIEDLEKANQGRLPLGAFPKQMLGLLQNKQPDLSEKAKIKIEKLIAETKLLSHRLNTKLKSSPKLGKRREKLIKTGVLADWLVKDFMRFQPVAYDAQNQPIESSKANSTEFQLIQRALALYGGEKNRLEGYFKQTNLIGNTNPHPFLNKFNWKACRNLVDFYQQYLEQREKFLEAIKNQPWEPYQYCLLLKIPKENRKNLVKGWEQGGISLPRGLFTEAIRETLSKDLTLSKPIRKEIKKHGRVGFISRAITLYFREKYQDDHQSFYDLPYKLEAKASPLPKKEHYEYWQQNKPQSPTELQRLELHTSDRWKDYLLYKRWQHLEKKLRLYRNQDVMLWLMTLELTKNHFKELNLNYHQLKLENLAVNVQEADAKLNPLNQTLPMVLPVKVYPATAFGEVQYQETPIRTVYIREEQTKALKMGNFKALVKDRRLNGLFSFIKEENDTQKHPISQLRLRRELEIYQSLRVDAFKETLNLEEKLLKKHTSLSSVENKFRILLEEWKKEYAASSMVTDEHIAFIASVRNAFCHNQYPFYEEALHAPIPLFTVAQQTTEEKDGLGIAEALLRVLREYCEIVKSQI

SEQ ID NO: 412 - protein, 1149 aa, Sinomicrobium oceani
MESTTTLGLHLKYQHDLFEDKHYFGGGVNLAVQNIESIFQAFAERYGIQNPLRKNGVPAINNIFHDNISISNYKEYLKFLKQYLPVVGFLEKSNEINIFEFREDFEILINAIYKLRHFYTHYYHSPIKLEDRFYTCLNELFVAVAIQVKKHKMKSDKTRQLLNKNLHQLLQQLIEQKREKLKDKKAEGEKVSLDTKSIENAVLNDAFVHLLDKDENIRLNYSSRLSEDIITKNGITLSISGLLFLLSLFLQRKEAEDLRSRIEGFKGKGNELRFMATHWVFSYLNVKRIKHRLNTDFQKETLLIQIADELSKVPDEVYKTLDHENRSKFLEDINEYIREGNEDASLNESTVVHGVIRKRYENKFHYLVLRYLDEFVDFPSLRFQVHLGNYIHDRRDKVIDGTNFITNRVIKEPIKVFGKLSHVSKLKSDYMESLSREHKNGWDVFPNPSYNFVGHNIPIFINLRSASSKGKELYRDLMKIKSEKKKKSREEGIPMERRDGKPTKIEISNQIDRNIKDNNFKDIYPGEPLAMLSLNELPALLFELLRRPSITPQDIEDRMVEKLYERFQIIRDYKPGDGLSTSKISKKLRKADNSTRLDGKKLLRAIQTETRNAREKLHTLEENKALQKNRKRRTVYTTREQGREASWLAQDLKRFMPIASRKEWRGYHHSQLQQILAFYDQNPKQPLELLEQFWDLKEDTYVWNSWIHKSLSQHNGFVPMYEGYLKGRLGYYKKLESDIIGFLEEHKVLKRYYTQQHLNVIFRERLYFIKTETKQKLELLARPLVFPRGIFDDKPTFVQDKKVVDHPELFADWYVYSYKDDHSFQEFYHYKRDYNEIFETELSWDIDFKDNKRQLNPSEQMDLFRMKWDLKIKKIKIQDIFLKIVAEDIYLKIFGHKIPLSLSDFYISRQERLTLDEQAVAQSMRLPGDTSENQIKESNLWQTTVPYEKEQIREPKIKLKDIGKFKYFLQQQKVLNLLKYDPQHVWTKAELEEELYIGKHSYEVVRREMLLQKCHQLEKHILEQFRFDGSNHPRELEQGNHPNFKMYIVNGILTKRGELEIEAENWWLELGNSKNSLDKVEVELLTMKTIPEQKAFLLILIRNKFAHNQLPADNYFHYASNLMNLKKSDTYSLFWFTVADTIVQEFMSL

SEQ ID NO: 413 - protein, 1133 aa, Richenbachiella agariperforans
MKTNPLIASSGEKPNYKKFNTESDKSFKKIFQNKGSIAPIAEKACKNFEIKSKSPVNRDGRLHYFSVGHAFKNIDSKNVFRYELDESQMDMKPTQFLALQKEFFDFQGALNGLLKHIRNVNSHYVHTFEKLEIQSINQKLITFLIEAFELAVIHSYLNEEELSYEAYKDDPQSGQKLVQFLCDKFYPNKEHEVEERKTILAKNKRQALEHLLFIEVTSDIDWKLFEKHKVFTISNGKYLSFHACLFLLSLFLYKSEANQLISKIKGFKRNDDNQYRSKRQIFTFFSKKFTSQDVNSEEQHLVKFRDVIQYLNHYPSAWNKHLELKSGYPQMTDKLMRYIVEAEIYRSFPDQTDNHRFLLFAIREFFGQSCLDTWTGNTPINFSNQEQKGFSYEINTSAEIKDIETKLKALVLKGPLNFKEKKEQNRLEKDLRREKKEQPTNRVKEKLLTRIQHNMLYVSYGRNQDRFMDFAARFLAETDYFGKDAKFKMYQFYTSDEQRDHLKEQKKELPKKEFEKLKYHQSKLVDYFTYAEQQARYPDWDTPFVVENNAIQIKVTLFNGAKKIVSVQRNLMLYLLEDALYSEKRENAGKGLISGYFVHHQKELKDQLDILEKETEISREQKREFKKLLPKRLLHRYSPAQINDTTEWNPMEVILEEAKAQEQRYQLLLEKAILHQTEEDFLKRNKGKQFKLRFVRKAWHLMYLKELYMNKVAEHGHHKSFHITKEEFNDFCRWMFAFDEVPKYKEYLCDYFSQKGFFNNAEFKDLIESSTSLNDLYEKTKQRFEGWSKDLTKQSDENKYLLANYESMLKDDMLYVNISHFISYLESKGKINRNAHGHIAYKALNNVPHLIEEYYYKDRLAPEEYKSHGKLYNKLKTVKLEDALLYEMAMHYLSLEPALVPKVKTKVKDILSSNIAFDIKDAAGHHLYHLLIPFHKIDSFVALINHQSQQEKDPDKTSFLAKIQPYLEKVKNSKDLKAVYHYYKDTPHTLRYEDLNMIHSHIVSQSVQFTKVALKLEEYFIAKKSITLQIARQISYSEIADLSNYFTDEVRNTAFHFDVPETAYSMILQGIESEFLDREIKPQKPKSLSELSTQQVSVCTAFLETLHNNLFDRKDDKKERLSKARERYFEQIN

SEQ ID NO: 414 - RNA, 25 nt, Artificial sequence
  RNA aptamer
gggaacaaagcugaaguacuuaccc

SEQ ID NO: 415 - DNA, 18 bp, Artificial Sequence
  Synthetic G-quadraplex
gggtagggcgggttggga

SEQ ID NO: 416 - RNA, 12 nt, Artificial sequence
  synthetic linker
  misc_feature (1)..(1): /5Biosg/ biotin tag
  misc_feature (12)..(12): /31AbRQSp/ Iowa black quencher
ucucguacguuc

SEQ ID NO: 417 - RNA, 24 nt, Artificial Sequence
  Synthetic tag
ucucguacguucucucguacguuc

SEQ ID NO: 418 - DNA, 10 bp, Artificial Sequence
  synthetic
tatatatata

SEQ ID NO: 419 - DNA, 15 bp, Artificial Sequence
  Synthetic
gtcgtcgtcgtcgtc

SEQ ID NO: 420 - DNA, 22 bp, Artificial Sequence
  Synthetic primer
gtggaattgtgagcggataaac

SEQ ID NO: 421 - DNA, 21 bp, Artificial Sequence
  Synthetic primer
aacagcaatctactcgacctg

SEQ ID NO: 422 - DNA, 9 bp, Artificial Sequence
  Synthetic primer
aggaaacag

SEQ ID NO: 423 - DNA, 19 bp, Artificial Sequence
  Synthetic primer
ctatgaccatgattacgcc

SEQ ID NO: 424 - DNA, 25 bp, Artificial Sequence
  Synthetic
ggttggtagtctcgaattgctctct

SEQ ID NO: 425 - RNA, 44 nt, Artificial Sequence
  Synthetic
gcaaggggacuaaaacuagauugcuguucuaccaaguaauccau

SEQ ID NO: 426 - RNA, 23 nt, Artificial Sequence
  Synthetic
uagauugcuguucuaccaaguaa

SEQ ID NO: 427 - RNA, 20 nt, Artificial Sequence
  Synthetic
uagauugcuguucuaccaag

SEQ ID NO: 428 - RNA, 28 nt, Artificial Sequence
  Synthetic
auggauuacuugguagaacagcaaucua

SEQ ID NO: 429 - RNA, 28 nt, Artificial Sequence
  Sytthetic
auggauuacuugguagaacagcaaugua

SEQ ID NO: 430 - RNA, 17 nt, Artificial Sequence
  Synthetic
uagauugcuguucuacc

SEQ ID NO: 431 - RNA, 17 nt, Artificial Sequence
  Synthetic
aagauugcuguucuacc

SEQ ID NO: 432 - RNA, 17 nt, Artificial Sequence
  Synthetic
uugauugcuguucuacc

SEQ ID NO: 433 - RNA, 17 nt, Artificial Sequence
  Synthetic
uaguuugcuguucuacc

SEQ ID NO: 434 - RNA, 17 nt, Artificial Sequence
  Synthetic
uagaaugcuguucuacc

SEQ ID NO: 435 - RNA, 17 nt, Artificial Sequence
  Synthetic
uagauagcuguucuacc

SEQ ID NO: 436 - RNA, 17 nt, Artificial Sequence
  Synthetic
uagauuccuguucuacc

SEQ ID NO: 437 - RNA, 30 nt, Artificial Sequence
  Synthetic
auggauuacuugguagaacagaaucuacuc

SEQ ID NO: 438 - RNA, 30 nt, Artificial Sequence
  Synthetic
auggauuacuugguagaacagaauguacuc

SEQ ID NO: 439 - RNA, 28 nt, Artificial Sequence
  Synthetic
aagauugcuguucuaccaaguaauccau

SEQ ID NO: 440 - RNA, 28 nt, Artificial Sequence
  Synthetic
uugauugcuguucuaccaaguaauccau

SEQ ID NO: 441 - RNA, 28 nt, Artificial Sequence
  Synthetic
uaguuugcuguucuaccaaguaauccau

SEQ ID NO: 442 - RNA, 28 nt, Artificial Sequence
  Synthetic
uagaaugcuguucuaccaaguaauccau

SEQ ID NO: 443 - RNA, 28 nt, Artificial Sequence
  Synthetic
uagauagcuguucuaccaaguaauccau

SEQ ID NO: 444 - RNA, 28 nt, Artificial Sequence
  Synthetic
uagauuccuguucuaccaaguaauccau

SEQ ID NO: 445 - RNA, 28 nt, Artificial Sequence
  Synthetic
cuagauugcuguucuaccaaguaaucca

SEQ ID NO: 446 - RNA, 28 nt, Artificial Sequence
  Synthetic
gaagauugcuguucuaccaaguaaucca

SEQ ID NO: 447 - RNA, 28 nt, Artificial Sequence
  Synthetic
guugauugcuguucuaccaaguaaucca

SEQ ID NO: 448 - RNA, 28 nt, Artificial Sequence
  Synthetic
guaguuugcuguucuaccaaguaaucca

SEQ ID NO: 449 - RNA, 28 nt, Artificial Sequence
  Synthetic
guagaaugcuguucuaccaaguaaucca

SEQ ID NO: 450 - RNA, 28 nt, Artificial Sequence
  Synthetic
guagauagcuguucuaccaaguaaucca

SEQ ID NO: 451 - RNA, 28 nt, Artificial Sequence
  Synthetic
acuagauugcuguucuaccaaguaaucc

SEQ ID NO: 452 - RNA, 28 nt, Artificial Sequence
  Synthetic
agaagauugcuguucuaccaaguaaucc

SEQ ID NO: 453 - RNA, 28 nt, Artificial Sequence
  Synthetic
aguugauugcuguucuaccaaguaaucc

SEQ ID NO: 454 - RNA, 28 nt, Artificial Sequence
  Synthetic
aguaguuugcuguucuaccaaguaaucc

SEQ ID NO: 455 - RNA, 28 nt, Artificial Sequence
  Synthetic
aguagaaugcuguucuaccaaguaaucc

SEQ ID NO: 456 - RNA, 28 nt, Artificial Sequence
  Synthetic
aguagauagcuguucuaccaaguaaucc

SEQ ID NO: 457 - RNA, 28 nt, Artificial Sequence
  Synthetic
gacuagauugcuguucuaccaaguaauc

SEQ ID NO: 458 - RNA, 28 nt, Artificial Sequence
  Synthetic
gagaagauugcuguucuaccaaguaauc

SEQ ID NO: 459 - RNA, 28 nt, Artificial Sequence
  Synthetic
gaguugauugcuguucuaccaaguaauc

SEQ ID NO: 460 - RNA, 28 nt, Artificial Sequence
  Synthetic
gaguaguuugcuguucuaccaaguaauc

SEQ ID NO: 461 - RNA, 28 nt, Artificial Sequence
  Synthetic
gaguagaaugcuguucuaccaaguaauc

SEQ ID NO: 462 - RNA, 28 nt, Artificial Sequence
  Synthetic
gaguagauagcuguucuaccaaguaauc

SEQ ID NO: 463 - DNA, 57 bp, Artificial Sequence
  P. falciparum target
gaaattaatacgactcactatagggttattgcaattattaatcttgaacgaggaatg

SEQ ID NO: 464 - DNA, 57 bp, Artificial Sequence
  P. falciparum
gaaattaatacgactcactataggggattgacagattaatagctctttcttgatttc

SEQ ID NO: 465 - DNA, 32 bp, Artificial Sequence
  P. falciparum
atttttcttgtccaaacaattcatcatatctt

SEQ ID NO: 466 - DNA, 32 bp, Artificial Sequence
  P. falciparum
ttcaatttcaaataagaatatagtgtactcgc

SEQ ID NO: 467 - DNA, 57 bp, Artificial Sequence
  P. falciparum
gaaattaatacgactcactatagggttcttattagcagaacaaagaagtttaacaac

SEQ ID NO: 468 - DNA, 57 bp, Artificial Sequence
  P. falciparum
gaaattaatacgactcactatagggattttatgcaatgttaaaaactgttccaagta

SEQ ID NO: 469 - DNA, 32 bp, Artificial Sequence
  P. falciparum
taattgacatccaatccataataaagcataga

SEQ ID NO: 470 - DNA, 32 bp, Artificial Sequence
  P. falciparum
gaattatagttgttaaacttctttgttctgct

SEQ ID NO: 471 - DNA, 89 bp, Artificial Sequence
  P. falciparum
cctagtaagcatgattcatcagattgtggttttagtccccttcgtttttggggtagtctaaatcccctatagtgagtcgtattaatttc

SEQ ID NO: 472 - DNA, 89 bp, Artificial Sequence
  P. falciparum
ggatggtgatgcatggccgtttttagttgttttagtccccttcgtttttggggtagtctaaatcccctatagtgagtcgtattaatttc

SEQ ID NO: 473 - DNA, 89 bp, Artificial Sequence
  P falciparum
caatttaaaatgatttttggtgctagaggttttagtccccttcgtttttggggtagtctaaatcccctatagtgagtcgtattaatttc

SEQ ID NO: 474 - DNA, 89 bp, Artificial Sequence
  P. falciparum
gctggtttagtaattgtattattatcatgttttagtccccttcgtttttggggtagtctaaatcccctatagtgagtcgtattaatttc

SEQ ID NO: 475 - DNA, 124 bp, Artificial Sequence
  Synthetic
tacttggtagaacagcaatctactcgacctgcaggcatgcaagcttggcgtaatcatggtcatagctgtttcctgtgtttatccgctcacaattccacacaacatacgagccggaagcataaag

SEQ ID NO: 476 - DNA, 124 bp, Artificial Sequence
  Synthetic
atgaaccatcttgtcgttagatgagctggacgtccgtacgttcgaaccgcattagtaccagtatcgacaaaggacacaaataggcgagtgttaaggtgtgttgtatgctcggccttcgtattta

SEQ ID NO: 477 - protein, 1389 aa, Leptotrichia shahii
MGNLFGHKRWYEVRDKKDFKIKRKVKVKRNYDGNKYILNINENNNKEKIDNNKFIRKYINYKKNDNILKEFTRKFHAGNILFKLKGKEGIIRIENNDDFLETEEVVLYIEAYGKSEKLKALGITKKKIIDEAIRQGITKDDKKIEIKRQENEEEIEIDIRDEYTNKTLNDCSIILRIIENDELETKKSIYEIFKNINMSLYKIIEKIIENETEKVFENRYYEEHLREKLLKDDKIDVILTNFMEIREKIKSNLEILGFVKFYLNVGGDKKKSKNKKMLVEKILNINVDLTVEDIADFVIKELEFWNITKRIEKVKKVNNEFLEKRRNRTYIKSYVLLDKHEKFKIERENKKDKIVKFFVENIKNNSIKEKIEKILAEFKIDELIKKLEKELKKGNCDTEIFGIFKKHYKVNFDSKKFSKKSDEEKELYKIIYRYLKGRIEKILVNEQKVRLKKMEKIEIEKILNESILSEKILKRVKQYTLEHIMYLGKLRHNDIDMTTVNTDDFSRLHAKEELDLELITFFASTNMELNKIFSRENINNDENIDFFGGDREKNYVLDKKILNSKIKIIRDLDFIDNKNNITNNFIRKFTKIGTNERNRILHAISKERDLQGTQDDYNKVINIIQNLKISDEEVSKALNLDVVFKDKKNIITKINDIKISEENNNDIKYLPSFSKVLPEILNLYRNNPKNEPFDTIETEKIVLNALIYVNKELYKKLILEDDLEENESKNIFLQELKKTLGNIDEIDENIIENYYKNAQISASKGNNKAIKKYQKKVIECYIGYLRKNYEELFDFSDFKMNIQEIKKQIKDINDNKTYERITVKTSDKTIVINDDFEYIISIFALLNSNAVINKIRNRFFATSVWLNTSEYQNIIDILDEIMQLNTLRNECITENWNLNLEEFIQKMKEIEKDFDDFKIQTKKEIFNNYYEDIKNNILTEFKDDINGCDVLEKKLEKIVIFDDETKFEIDKKSNILQDEQRKLSNINKKDLKKKVDQYIKDKDQEIKSKILCRIIFNSDFLKKYKKEIDNLIEDMESENENKFQEIYYPKERKNELYIYKKNLFLNIGNPNFDKIYGLISNDIKMADAKFLFNIDGKNIRKNKISEIDAILKNLNDKLNGYSKEYKEKYIKKLKENDDFFAKNIQNKNYKSFEKDYNRVSEYKKIRDLVEFNYLNKIESYLIDINWKLAIQMARFERDMHYIVNGLRELGIIKLSGYNTGISRAYPKRNGSDGFYTTTAYYKFFDEESYKKFEKICYGFGIDLSENSEINKPENESIRNYISHFYIVRNPFADYSIAEQIDRVSNLLSYSTRYNNSTYASVFEVFKKDVNLDYDELKKKFKLIGNNDILERLMKPKKVSVLELESYNSDYIKNLIIELLTKIENTNDTL

SEQ ID NO: 478 - protein, 1276 aa, Blautia sp.Marseille-P2398 (C2-29); identical to SEQ ID NO: 319

SEQ ID NO: 479 - protein, 948 aa, Artificial Sequence; identical to SEQ ID NO: 378
  Riemerella anatipestifer

SEQ ID NO: 480 - protein, 948 aa, Artificial Sequence; identical to SEQ ID NO: 403
  Riemerella anatipestifer

SEQ ID NO: 481 - protein, 950 aa, Artificial Sequence; identical to SEQ ID NO: 409
  Riemerella anatipestifer

SEQ ID NO: 482 - protein, 953 aa, Alistipes sp. ZOR0009; identical to SEQ ID NO: 331

SEQ ID NO: 483 - protein, 1036 aa, Artificial Sequence; identical to SEQ ID NO: 365
  Chryseobacterium ureilyticum

SEQ ID NO: 484 - protein, 1090 aa, Artificial Sequence; identical to SEQ ID NO: 341
  Prevotella sp.

SEQ ID NO: 485 - protein, 1090 aa, Artificial Sequence; identical to SEQ ID NO: 396
  Prevotella sp.

SEQ ID NO: 486 - protein, 1090 aa, Artificial Sequence; identical to SEQ ID NO: 397
  Prevotella sp.

SEQ ID NO: 487 - protein, 1090 aa, Artificial Sequence; identical to SEQ ID NO: 398
  Prevotella sp.

SEQ ID NO: 488 - protein, 1095 aa, Artificial Sequence; identical to SEQ ID NO: 334
  Riemerella anatispestifer

SEQ ID NO: 489 - protein, 1095 aa, Artificial Sequence; identical to SEQ ID NO: 411
  Riemerella anatispestifer

SEQ ID NO: 490 - protein, 1115 aa, Artificial Sequence; identical to SEQ ID NO: 330
  Synthetic

SEQ ID NO: 491 - protein, 1115 aa, Artificial Sequence; identical to SEQ ID NO: 357
  Bacteroides pyogenes

SEQ ID NO: 492 - protein, 1116 aa, Artificial Sequence; identical to SEQ ID NO: 386
  Prevotella pleuritidis

SEQ ID NO: 493 - protein, 1119 aa, Artificial Sequence; identical to SEQ ID NO: 345
  Porphyromonas gingivalis

SEQ ID NO: 494 - protein, 1119 aa, Artificial Sequence; identical to SEQ ID NO: 373
  Porphyromonas gingivalis

SEQ ID NO: 495 - protein, 1119 aa, Artificial Sequence; identical to SEQ ID NO: 375
  Porphyromonas gingivalis

SEQ ID NO: 496 - protein, 1119 aa, Artificial Sequence; identical to SEQ ID NO: 387
  Porphyromonas gingivalis

SEQ ID NO: 497 - protein, 1119 aa, Artificial Sequence; identical to SEQ ID NO: 389
  Porphyromonas gulae

SEQ ID NO: 498 - protein, 1119 aa, Artificial Sequence; identical to SEQ ID NO: 390
  Porphyromonas gulae

SEQ ID NO: 499 - protein, 1119 aa, Artificial Sequence; identical to SEQ ID NO: 392
  Porphyromonas gulae

SEQ ID NO: 500 - protein, 1119 aa, Artificial Sequence; identical to SEQ ID NO: 407
  Porphyromonas gingivalis

SEQ ID NO: 501 - protein, 1120 aa, Artificial Sequence; identical to SEQ ID NO: 338
  Prevotella intermedia

SEQ ID NO: 502 - protein, 1124 aa, Artificial Sequence; identical to SEQ ID NO: 335
  Prevotella aurantiaca

SEQ ID NO: 503 - protein, 1125 aa, Artificial Sequence; identical to SEQ ID NO: 351
  Prevotella pallens

SEQ ID NO: 504 - protein, 1125 aa, Artificial Sequence; identical to SEQ ID NO: 361
  Prevotella intermedia ZT

SEQ ID NO: 505 - protein, 1125 aa, Artificial Sequence; identical to SEQ ID NO: 351
  Prevotella pallens

SEQ ID NO: 506 - protein, 1126 aa, Artificial Sequence; identical to SEQ ID NO: 327
  Prevotella intermedia

SEQ ID NO: 507 - protein, 1127 aa, Artificial Sequence; identical to SEQ ID NO: 328
  Prevotella buccae

SEQ ID NO: 508 - protein, 1127 aa, Artificial Sequence; identical to SEQ ID NO: 328
  Prevotella buccae

SEQ ID NO: 509 - protein, 1127 aa, Artificial Sequence; identical to SEQ ID NO: 328
  Prevotella buccae

SEQ ID NO: 510 - protein, 1127 aa, Artificial Sequence; identical to SEQ ID NO: 372
  Prevotella sp. MSX73

SEQ ID NO: 511 - protein, 1131 aa, Artificial Sequence; identical to SEQ ID NO: 399
  Phaeodactylibacter xiamenensis

SEQ ID NO: 512 - protein, 1132 aa, Artificial Sequence; identical to SEQ ID NO: 347
  Prevotella intermedia

SEQ ID NO: 513 - protein, 1133 aa, Artificial Sequence; identical to SEQ ID NO: 349
  Prevotella intermedia

SEQ ID NO: 514 - protein, 1133 aa, Artificial Sequence; identical to SEQ ID NO: 385
  Prevotella falsenii

SEQ ID NO: 515 - protein, 1133 aa, Artificial Sequence; identical to SEQ ID NO: 413
  Reichenbachiella agariperforans

SEQ ID NO: 516 - protein, 1134 aa, Artificial Sequence; identical to SEQ ID NO: 348
  Prevotella intermedia 17

SEQ ID NO: 517 - protein, 1135 aa, Artificial Sequence; identical to SEQ ID NO: 329
  Synthetic

SEQ ID NO: 518 - protein, 1135 aa, Artificial Sequence; identical to SEQ ID NO: 358
  Porphyromonas gingivalis

SEQ ID NO: 519 - protein, 1135 aa, Artificial Sequence; identical to SEQ ID NO: 359
  Porphyromonas gingivalis

SEQ ID NO: 520 - protein, 1135 aa, Artificial Sequence; identical to SEQ ID NO: 360
  Porphyromonas gingivalis

SEQ ID NO: 521 - protein, 1135 aa, Artificial Sequence; identical to SEQ ID NO: 367
  Porphyromonas gingivalis

SEQ ID NO: 522 - protein, 1135 aa, Artificial Sequence; identical to SEQ ID NO: 358
  Porphyromonas gingivalis

SEQ ID NO: 523 - protein, 1135 aa, Artificial Sequence; identical to SEQ ID NO: 381
  Porphyromonas gingivalis

SEQ ID NO: 524 - protein, 1135 aa, Artificial Sequence; identical to SEQ ID NO: 359
  Porphyromonas gingivalis

SEQ ID NO: 525 - protein, 1135 aa, Artificial Sequence; identical to SEQ ID NO: 360
  Porphyromonas gingivalis

SEQ ID NO: 526 - protein, 1135 aa, Artificial Sequence; identical to SEQ ID NO: 384
  Porphyromonas gingivalis

SEQ ID NO: 527 - protein, 1135 aa, Artificial Sequence; identical to SEQ ID NO: 394
  Porphyromonas gulae

SEQ ID NO: 528 - protein, 1135 aa, Artificial Sequence; identical to SEQ ID NO: 408
  Porphyromonas gingivalis

SEQ ID NO: 529 - protein, 1139 aa, Artificial Sequence; identical to SEQ ID NO: 379
  Prevotella pleuritidis

SEQ ID NO: 530 - protein, 1145 aa, Artificial Sequence; identical to SEQ ID NO: 377
  Psychroflexus torquis

SEQ ID NO: 531 - protein, 1145 aa, Artificial Sequence; identical to SEQ ID NO: 402
  Chryseobacterium sp. YR477

SEQ ID NO: 532 - protein, 1149 aa, Artificial Sequence; identical to SEQ ID NO: 412
  Sinomicrobium oceani

SEQ ID NO: 533 - protein, 1150 aa, Artificial Sequence; identical to SEQ ID NO: 342
  Flavobacterium branchiophilum

SEQ ID NO: 534 - protein, 1150 aa, Artificial Sequence; identical to SEQ ID NO: 355
  Prevotella saccharolytica

SEQ ID NO: 535 - protein, 1151 aa, Artificial Sequence; identical to SEQ ID NO: 336
  Prevotella saccharolytica

SEQ ID NO: 536 - protein, 1154 aa, Artificial Sequence; identical to SEQ ID NO: 374
  Paludibacter propionicigenes

SEQ ID NO: 537 - protein, 1155 aa, Artificial Sequence; identical to SEQ ID NO: 400
  Flavobacterium sp. 316

SEQ ID NO: 538 - protein, 1156 aa, Artificial Sequence; identical to SEQ ID NO: 364
  Chryseobacterium carnipullorum

SEQ ID NO: 539 - protein, 1157 aa, Artificial Sequence; identical to SEQ ID NO: 352
  Myroides odoratimimus

SEQ ID NO: 540 - protein, 1157 aa, Artificial Sequence; identical to SEQ ID NO: 353
  Myroides odoratimimus

SEQ ID NO: 541 - protein, 1157 aa, Artificial Sequence; identical to SEQ ID NO: 352
  Myroides odoratimimus

SEQ ID NO: 542 - protein, 1157 aa, Artificial Sequence; identical to SEQ ID NO: 353
  Myroides odoratimimus

SEQ ID NO: 543 - protein, 1159 aa, Artificial Sequence; identical to SEQ ID NO: 337
  Synthetic

SEQ ID NO: 544 - protein, 1159 aa, Artificial Sequence; identical to SEQ ID NO: 343
  Unknown

SEQ ID NO: 545 - protein, 1161 aa, Artificial Sequence; identical to SEQ ID NO: 362
  Bacteroidetes bacterium GWA2_31_9

SEQ ID NO: 546 - protein, 1165 aa, Artificial Sequence; identical to SEQ ID NO: 363
  Chryseobacterium jejuense

SEQ ID NO: 547 - protein, 1174 aa, Artificial Sequence; identical to SEQ ID NO: 393
  Porphyromonas gulae

SEQ ID NO: 548 - protein, 1175 aa, Artificial Sequence; identical to SEQ ID NO: 340
  Porphyromonas gulae

SEQ ID NO: 549 - protein, 1175 aa, Artificial Sequence; identical to SEQ ID NO: 346
  Unknown

SEQ ID NO: 550 - protein, 1175 aa, Artificial Sequence; identical to SEQ ID NO: 356
  Porphyromonas gingivalis JCVISC001

SEQ ID NO: 551 - protein, 1175 aa, Artificial Sequence; identical to SEQ ID NO: 368
  Porphyromonas gingivalis

SEQ ID NO: 552 - protein, 1175 aa, Artificial Sequence; identical to SEQ ID NO: 388
  Porphyromonas gulae

SEQ ID NO: 553 - protein, 1175 aa, Artificial Sequence; identical to SEQ ID NO: 391
  Porphyromonas gulae

SEQ ID NO: 554 - protein, 1175 aa, Artificial Sequence; identical to SEQ ID NO: 401
  Porphyromonas gulae

SEQ ID NO: 555 - protein, 1175 aa, Artificial Sequence; identical to SEQ ID NO: 404
  Porphyromonas gulae

SEQ ID NO: 556 - protein, 1175 aa, Artificial Sequence; identical to SEQ ID NO: 405
  Porphyromonas gingivalis

SEQ ID NO: 557 - protein, 1179 aa, Artificial Sequence; identical to SEQ ID NO: 376
  Flavobacterium columnare

SEQ ID NO: 558 - protein, 1199 aa, Artificial Sequence; identical to SEQ ID NO: 339
  Capnocytophaga canimorsus

SEQ ID NO: 559 - protein, 1213 aa, Artificial Sequence; identical to SEQ ID NO: 406
  Flavobacterium columnare

SEQ ID NO: 560 - protein, 1213 aa, Artificial Sequence; identical to SEQ ID NO: 410
  Flavobacterium columnare

SEQ ID NO: 561 - protein, 1214 aa, Artificial Sequence; identical to SEQ ID NO: 344
  Unknown

SEQ ID NO: 562 - protein, 1218 aa, Artificial Sequence; identical to SEQ ID NO: 395
  Capnocytophaga cynodegmi

SEQ ID NO: 563 - protein, 1224 aa, Artificial Sequence; identical to SEQ ID NO: 326
  Bergeyella zoohelcum

SEQ ID NO: 564 - protein, 1224 aa, Artificial Sequence; identical to SEQ ID NO: 326
  Bergeyella zoohelcum

SEQ ID NO: 565 - protein, 1322 aa, Artificial Sequence; identical to SEQ ID NO: 332
  Prevotella sp. MA2016

SEQ ID NO: 566 - protein, 1322 aa, Artificial Sequence; identical to SEQ ID NO: 332
  Unknown

SEQ ID NO: 567 - protein, 668 aa, Artificial Sequence
  Fusobacterium necrophorum subsp. funduliforme
MTEKKSIIFKNKSSVEIVKKDIFSQTPDNMIRNYKITLKISEKNPRVVEAEIEDLMNSTILKDGRRSARREKSMTERKLIEEKVAENYSLLANCPMEEVDSIKIYKIKRFLTYRSNMLLYFASINSFLCEGIKGKDNETEEIWHLKDNDVRKEKVKENFKNKLIQSTENYNSSLKNQIEEKEKLLRKESKKGAFYRTIIKKLQQERIKELSEKSLTEDCEKIIKLYSELRHPLMHYDYQYFENLFENKENSELTKNLNLDIFKSLPLVRKMKLNNKVNYLEDNDTLFVLQKTKKAKTLYQIYDALCEQKNGFNKFINDFFVSDGEENTVFKQIINEKFQSEMEFLEKRISESEKKNEKLKKKFDSMKAHFHNINSEDTKEAYFWDIHSSSNYKTKYNERKNLVNEYTELLGSSKEKKLLREEITQINRKLLKLKQEMEEITKKNSLFRLEYKMKIAFGFLFCEFDGNISKFKDEFDASNQEKIIQYHKNGEKYLTYFLKEEEKEKFNLEKMQKIIQKTEEEDWLLPETKNNLFKFYLLTYLLLPYELKGDFLGFVKKHYYDIKNVDFMDENQNNIQVSQTVEKQEDYFYHKIRLFEKNTKKYEIVKYSIVPNEKLKQYFEDLGIDIKYLTGSVESGEKWLGENLGIDIKYLTVEQKSEVSEEKIKKFL

SEQ ID NO: 568 - protein, 796 aa, Artificial Sequence
  Tissierella sp. P1
MEKDKKGEKIDISQEMIEEDLRKILILFSRLRHSMVHYDYEFYQALYSGKDFVISDKNNLENRMISQLLDLNIFKELSKVKLIKDKAISNYLDKNTTIHVLGQDIKAIRLLDIYRDICGSKNGFNKFINTMITISGEEDREYKEKVIEHFNKKMENLSTYLEKLEKQDNAKRNNKRVYNLLKQKLIEQQKLKEWFGGPYVYDIHSSKRYKELYIERKKLVDRHSKLFEEGLDEKNKKELTKINDELSKLNSEMKEMTKLNSKYRLQYKLQLAFGFILEEFDLNIDTFINNFDKDKDLIISNFMKKRDIYLNRVLDRGDNRLKNIIKEYKFRDTEDIFCNDRDNNLVKLYILMYILLPVEIRGDFLGFVKKNYYDMKHVDFIDKKDKEDKDTFFHDLRLFEKNIRKLEITDYSLSSGFLSKEHKVDIEKKINDFINRNGAMKLPEDITIEEFNKSLILPIMKNYQINFKLLNDIEISALFKIAKDRSITFKQAIDEIKNEDIKKNSKKNDKNNHKDKNINFTQLMKRALHEKIPYKAGMYQIRNNISHIDMEQLYIDPLNSYMNSNKNNITISEQIEKIIDVCVTGGVTGKELNNNIINDYYMKKEKLVFNLKLRKQNDIVSIESQEKNKREEFVFKKYGLDYKDGEINIIEVIQKVNSLQEELRNIKETSKEKLKNKETLFRDISLINGTIRKNINFKIKEMVLDIVRMDEIRHINIHIYYKGENYTRSNIIKFKYAIDGENKKYYLKQHEINDINLELKDKFVTLICNMDKHPNKNKQTINLESNYIQNVKFIIP

SEQ ID NO: 569 - protein, 897 aa, Artificial Sequence
  Fusobacterium ulcerans
MENKGNNKKIDFDENYNILVAQIKEYFTKEIENYNNRIDNIIDKKELLKYSEKKEESEKNKKLEELNKLKSQKLKILTDEEIKADVIKIIKIFSDLRHSLMHYEYKYFENLFENKKNEELAELLNLNLFKNLTLLRQMKIENKTNYLEGREEFNIIGKNIKAKEVLGHYNLLAEQKNGFNNFINSFFVQDGTENLEFKKLIDEHFVNAKKRLERNIKKSKKLEKELEKMEQHYQRLNCAYVWDIHTSTTYKKLYNKRKSLIEEYNKQINEIKDKEVITAINVELLRIKKEMEEITKSNSLFRLKYKMQIAYAFLEIEFGGNIAKFKDEFDCSKMEEVQKYLKKGVKYLKYYKDKEAQKNYEFPFEEIFENKDTHNEEWLENTSENNLFKFYILTYLLLPMEFKGDFLGVVKKHYYDIKNVDFTDESEKELSQVQLDKMIGDSFFHKIRLFEKNTKRYEIIKYSILTSDEIKRYFRLLELDVPYFEYEKGTDEIGIFNKNIILTIFKYYQIIFRLYNDLEIHGLFNISSDLDKILRDLKSYGNKNINFREFLYVIKQNNNSSTEEEYRKIWENLEAKYLRLHLLTPEKEEIKTKTKEELEKLNEISNLRNGICHLNYKEIIEEILKTEISEKNKEATLNEKIRKVINFIKENELDKVELGFNFINDFFMKKEQFMFGQIKQVKEGNSDSITTERERKEKNNKKLKETYELNCDNLSEFYETSNNLRERANSSSLLEDSAFLKKIGLYKVKNNKVNSKVKDEEKRIENIKRKLLKDSSDIMGMYKAEVVKKLKEKLILIFKHDEEKRIYVTVYDTSKAVPENISKEILVKRNNSKEEYFFEDNNKKYVTEYYTLEITETNELKVIPAKKLEGKEFKTEKNKENKLMLNNHYCFNVKIIY

SEQ ID NO: 570 - protein, 919 aa, Artificial Sequence
  Cetobacterium sp, ZOR0034
MEEIKHKKNKSSIIRVIVSNYDMTGIKEIKVLYQKQGGVDTFNLKTIINLESGNLEIISCKPKEREKYRYEFNCKTEINTISITKKDKVLKKEIRKYSLELYFKNEKKDTVVAKVTDLLKAPDKIEGERNHLRKLSSSTERKLLSKTLCKNYSEISKTPIEEIDSIKIYKIKRFLNYRSNFLIYFALINDFLCAGVKEDDINEVWLIQDKEHTAFLENRIEKITDYIFDKLSKDIENKKNQFEKRIKKYKTSLEELKTETLEKNKTFYIDSIKTKITNLENKITELSLYNSKESLKEDLIKIISIFTNLRHSLMHYDYKSFENLFENIENEELKNLLDLNLFKSIRMSDEFKTKNRTNYLDGTESFTIVKKHQNLKKLYTYYNNLCDKKNGFNTFINSFFVTDGIENTDFKNLIILHFEKEMEEYKKSIEYYKIKISNEKNKSKKEKLKEKIDLLQSELINMREHKNLLKQIYFFDIHNSIKYKELYSERKNLIEQYNLQINGVKDVTAINHINTKLLSLKNKMDKITKQNSLYRLKYKLKIAYSFLMIEFDGDVSKFKNNFDPTNLEKRVEYLDKKEEYLNYTAPKNKFNFAKLEEELQKIQSTSEMGADYLNVSPENNLFKFYILTYIMLPVEFKGDFLGFVKNHYYNIKNVDFMDESLLDENEVDSNKLNEKIENLKDSSFFNKIRLFEKNIKKYEIVKYSVSTQENMKEYFKQLNLDIPYLDYKSTDEIGIFNKNMILPIFKYYQNVFKLCNDIEIHALLALANKKQQNLEYAIYCCSKKNSLNYNELLKTFNRKTYQNLSFIRNKIAHLNYKELFSDLFNNELDLNTKVRCLIEFSQNNKFDQIDLGMNFINDYYMKKTRFIFNQRRLRDLNVPSKEKIIDGKRKQQNDSNNELLKKYGLSRTNIKDIFNKAWY

SEQ ID NO: 571 - protein, 1110 aa, Artificial Sequence
  Fusobacterium necrophorum
MKVRYRKQAQLDTFIIKTEIVNNDIFIKSIIEKAREKYRYSFLFDGEEKYHFKNKSSVEIVKNDIFSQTPDNMIRNYKITLKISEKNPRVVEAEIEDLMNSTILKDGRRSARREKSMTERKLIEEKVAENYSLLANCPIEEVDSIKIYKIKRFLTYRSNMLLYFASINSFLCEGIKGKDNETEEIWHLKDNDVRKEKVKENFKNKLIQSTENYNSSLKNQIEEKEKLSSKEFKKGAFYRTIIKKLQQERIKELSEKSLTEDCEKIIKLYSELRHPLMHYDYQYFENLFENKENSELTKNLNLDIFKSLPLVRKMKLNNKVNYLEDNDTLFVLQKTKKAKTLYQIYDALCEQKNGFNKFINDFFVSDGEENTVFKQIINEKFQSEMEFLEKRISESEKKNEKLKKKLDSMKAHFRNINSEDTKEAYFWDIHSSRNYKTKYNERKNLVNEYTKLLGSSKEKKLLREEITKINRQLLKLKQEMEEITKKNSLFRLEYKMKIAFGFLFCEFDGNISKFKDEFDASNQEKIIQYHKNGEKYLTSFLKEEEKEKFNLEKMQKIIQKTEEEDWLLPETKNNLFKFYLLTYLLLPYELKGDFLGFVKKHYYDIKNVDFMDENQNNIQVSQTVEKQEDYFYHKIRLFEKNTKKYEIVKYSIVPNEKLKQYFEDLGIDIKYLTGSVESGEKWLGENLGIDIKYLTVEQKSEVSEEKNKKVSLKNNGMFNKTILLFVFKYYQIAFKLFNDIELYSLFFLREKSEKPFEVFLEELKDKMIGKQLNFGQLLYVVYEVLVKNKDLDKILSKKIDYRKDKSFSPEIAYLRNFLSHLNYSKFLDNFMKINTNKSDENKEVLIPSIKIQKMIQFIEKCNLQNQIDFDFNFVNDFYMRKEKMFFIQLKQIFPDINSTEKQKKSEKEEILRKRYHLINKKNEQIKDEHEAQSQLYEKILSLQKIFSCDKNNFYRRLKEEKLLFLEKQGKKKISMKEIKDKIASDISDLLGILKKEITRDIKDKLTEKFRYCEEKLLNISFYNHQDKKKEEGIRVFLIRDKNSDNFKFESILDDGSNKIFISKNGKEITIQCCDKVLETLMIEKNTLKISSNGKIISLIPHYSYSIDVKY

SEQ ID NO: 572 - protein, 1110 aa, Artificial Sequence
  Fusobacterium necrophorum
MEKFRRQNRSSIIKIIISNYDTKGIKELKVRYRKQAQLDTFIIKTEIVNNDIFIKSIIEKAREKYRYSFLFDGEEKYHFKNKSSVEIVKKDIFSQTPDNMIRNYKITLKISEKNPRVVEAEIEDLMNSTILKDGRRSARREKSMTERKLIEEKVAENYSLLANCPMEEVDSIKIYKIKRFLTYRSNMLLYFASINSFLCEGIKGKDNETEEIWHLKDNDVRKEKVKENFKNKLIQSTENYNSSLKNQIEEKEKLLRKESKKGAFYRTIIKKLQQERIKELSEKSLTEDCEKIIKLYSELRHPLMHYDYQYFENLFENKENSELTKNLNLDIFKSLPLVRKMKLNNKVNYLEDNDTLFVLQKTKKAKTLYQIYDALCEQKNGFNKFINDFFVSDGEENTVFKQIINEKFQSEIEFLEKRISESEKKNEKLKKKLDSMKAHFRNINSEDTKEAYFWDIHSSRNYKTKYNERKNLVNEYTELLGSSKEKKLLREEITKINRQLLKLKQEMEEITKKNSLFRLEYKMKMAFGFLFCEFDGNISRFKDEFDASNQEKIIQYHKNGEKYLTYFLKEEEKEKFNLKKLQETIQKTGEENWLLPQNKNNLFKFYLLTYLLLPYELKGDFLGFVKKHYYDIKNVDFMDENQSSKIIESKEDDFYHKIRLFEKNTKKYEIVKYSIVPDKKLKQYFKDLGIDTKYLILDQKSEVSGEKNKKVSLKNNGMFNKTILLFVFKYYQIAFKLFNDIELYSLFFLREKSGKPFEVFLKELKDKMIGKQLNFGQLLYVVYEVLVKNKDLSEILSERIDYRKDMCFSAEIADLRNFLSHNYSKFLDNFMKINTNKSDENKEVLIPSIKIQKMIKFIEECNLQSQIDFDFNFVNDFYMRKEKMFFIQLKQIFPDINSTEKQKMNEKEEILRNRYHLTDKKNEQIKDEHEAQSQLYEKILSLQKIYSSDKNNFYGRLKEEKLLFLEKQEKKKLSMEEIKDKIAGDISDLLGILKKEITRDIKDKLTEKFRYCEEKLLNLSFYNHQDKKKEESIRVFLIRDKNSDNFKFESILDDGSNKIFISKNGKEITIQCCDKVLETLIIEKNTLKISSNGKIISLIPHYSYSIDVKY

SEQ ID NO: 573 - protein, 1111 aa, Artificial Sequence
  Anaerosalibacer massiliensis
MKSGRREKAKSNKSSIVRVIISNFDDKQVKEIKVLYTKQGGIDVIKFKSTEKDEKGRMKFNFDCAYNRLEEEEFNSFGGKGKQSFFVTTNEDLTELHVTKRHKTTGEIIKDYTIQGKYTPIKQDRTKVTVSITDNKDHFDSNDLGDKIRLSRSLTQYTNRILLDADVMKNYREIVCSDSEKVDETINIDSQEIYKINRFLSYRSNMIIYYQMINNFLLHYDGEEDKGGNDSINLINEIWKYENKKNDEKEKIIERSYKSIEKSINQYILNHNTEVESGDKEKKIDISEERIKEDLKKTFILFSRLRHYMVHYNYKFYENLYSGKNFIIYNKDKSKSRRFSELLDLNIFKELSKIKLVKNRAVSNYLDKKTTIHVLNKNINAIKLLDIYRDICETKNGFNNFINNMMTISGEEDKEYKEMVTKHFNENMNKLSIYLENFKKHSDFKTNNKKKETYNLLKQELDEQKKLRLWFNAPYVYDIHSSKKYKELYVERKKYVDIHSKLIEAGINNDNKKKLNEINVKLCELNTEMKEMTKLNSKYRLQYKLQLAFGFILEEFNLDIDKFVSAFDKDNNLTISKFMEKRETYLSKSLDRRDNRFKKLIKDYKFRDTEDIFCSDRENNLVKLYILMYILLPVEIRGDFLGFVKKNYYDLKHVDFIDKRNNDNKDTFFHDLRLFEKNVKRLEVTSYSLSDGFLGKKSREKFGKELEKFIYKNVSIALPTNIDIKEFNKSLVLPMMKNYQIIFKLLNDIEISALFLIAKKEGNEGSITFKKVIDKVRKEDMNGNINFSQVMKMALNEKVNCQIRNSIAHINMKQLYIEPLNIYINNNQNKKTISEQMEEIIDICITKGLTGKELNKNIINDYYMKKEKLVFNLKLRKRNNLVSIDAQQKNMKEKSILNKYDLNYKDENLNIKEIILKVNDLNNKQKLLKETTEGESNYKNALSKDILLLNGIIRKNINFKIKEMILGIIQQNEYRYVNINIYDKIRKEDHNIDLKINNKYIEISCYENKSNESTDERINFKIKYMDLKVKNELLVPSCYEDIYIKKKIDLEIRYIENCKVVYIDIYYKKYNINLEFDGKTLFVKFNKDVKKNNQKVNLESNYIQNIKFIVS

SEQ ID NO: 574 - protein, 1111 aa, Artificial Sequence
  Fusobacterium necrophorum
MEKFRRQNRNSIIKIIISNYDTKGIKELKVRYRKQAQLDTFIIKTEIVNNDIFIKSIIEKAREKYRYSFLFDGEEKYHFKNKSSVEIVKKDIFSQTPDNMIRNYKITLKISEKNPRVVEAEIEDLMNSTILKDGRRSARREKSVTERKLIEEKVAENYSLLANCPMEEVDSIKIYKIKRFLTYRSNMLLYFASINSFLCEGIKGKENETEEIWHLKDNDVRKEKVKENFKNKLIQSTENYNSSLKNQIEEKEKLLRKESKKGAFYRTIIKKLQQERIKELSEKSLTEDCEKIIKLYSKLRHSLMHYDYQYFENLFENKETPELKDKLDLHLFKSLPLIRKMKLNNKVNYLEDGDTLFVLQKTKKAKTLYQIYDALCEQKNGFNKFINDFFVSDGEENTVFKQIINEKFQSEMEFLGKRISESEEKNPKLKKKFDSMKAHFHNINSEDTKEAYFWDIHSSSNYKTKYNERKNLVNEYTELLGSSKEKKLLREEITQINRKLLKLKQEMEEITKKNSLFRLEYKMKMAFGFLFCEFDGNISRFKDEFDASNQEKIIQYHKNGEKYLTYFLKEEEKEKFNLKKLQETIQKTGKENWLLPQNKNNLFKFYLLTYLLLPYELKGDFLGFVKKHYYDIKNVDFMDENQSSKIIESKEDDFYHKIRLFEKNTKKYEIVKYSIVPDEKLKQYFKDLGIDTKYLILEQKSEVSGEKNKKVSLKNNGMFNKTILLFVFKYYQIAFKLFNDIELYSLFFLREKSGKPFEVFLKELKDKMIGKQLNFGQLLYVIYEVLVKNKDLSEILSERIDYRKDMCFSAEIADLRNFLSHLNYSKFLDNFMKINTNKSDENKEVLIPSIKIQKMIKFIEECNLQSQIDFDFNFVNDFYMRKEKMFFIQLKQIFPDINSTEKQKMNEKEEILRNRYHLTDKKNEQIKDEHEAQSQLYEKILSLQKIYSSDKNNFYGRLKEEKLLFLGKQGKKKLSMEEIKDKIAGDISDLLGILKKEITRDIKDKLTEKFRYCEEKLLNLSFYNHQDKKKEESIRVFLIRDKNSDNFKFESILDDGSNKIFISKNGKEITIQCCDKVLETLMIEKNTLKISSNGKIISLVPHYSYSIDVKY

SEQ ID NO: 575 - protein, 1115 aa, Artificial Sequence
  Fusobacterium necrophorum
MEKFRRQNRNSIIKIIISNYDTKGIKELKVRYRKQAQLDTFIIKTEIVNNDIFIKSIIEKAREKYRYSFLFDGEEKYHFKNKSSVEIVKKDIFSQTPDNMIRNYKITLKISEKNPRVVEAEIEDLMNSTILKDGRRSARREKSMTERKLIEEKVAKNYSLLANCPMEEVDSIKIYKIKRFLTYRSNMLLYFASINSFLCEGIKGKDNETEEIWHLKDNDVRKEKVRENFKNKLIQSTENYNSSLKNQIEEKEKLLRKEFKKGAFYRTIIKKLQQERIKELSEKSLTEDCEKIIKLYSKLRHSLMHYDYQYFENLFENKKNDDLMKDLNLDLFKSLPLIRKMKLNNKVNYLEDGDTLFVLQKTKKAKTLYQIYDALCEQKNGFNKFINDFFVSDGEENTVFKQIINEKFQSEMEFLEKRISESEKKNEKLKKKLDSMKAHFRNINSEDTKEAYFWDIHSSRNYKTKYNERKNLVNEYTELLGSSKEKKLLREEITKINRQLLKLKQEMEEITKKNSLFRLEYKMKIAFGFLFCEFDGNISKFKDEFDASNQEKIIQYHKNGEKYLTSFLKEEEKEKFNLEKMQKIIQKTEEEDWLLPETKNNLFKFYLLTYLLLPYELKGDFLGFVKKHYYDIKNVDFIDENQNNIQVSQTVEKQEDYFYHKIRLFEKNTKKYEIVKYSIVPNEKLKQYFEDLGIDIKYLTVEQKSEVSEEKNKKVSLKNNGMFNKTILLFVFKYYQIAFKLFNDIELYSLFFLREKSGKPLEIFRKELESKMKDGYLNFGQLLYVVYEVLVKNKDLDKILSKKIDYRKDKSFSPEIAYLRNFLSHLNYSKFLDNFMKINTNKSDENKEVLIPSIKIQKMIQFIEKCNLQNQIDFDFNFVNDFYMRKEKMFFIQLKQIFPDINSTEKQKMNEKEEILRNRYHLTDKKNEQIKDEHEAQSQLYEKILSLQKIYSSDKNNFYGRLKEEKLLFLEKQGKKKLSMEEIKDKIAGDISDLLGILKKEITRDIKDKLTEKFRYCEEKLLNLSFYNHQDKKKEESIRVFLIRDKNSDNFKFESILDDGSNKIFISKNGKEITIQCCDKVLETLIIEKNTLKISSNGKIISLIPHYSYSIDVKY

SEQ ID NO: 576 - protein, 1121 aa, Artificial Sequence
  Fusobacterium perfoetens
MGKPNRSSIIKIIISNYDNKGIKEVKVRYNKQAQLDTFLIKSELKDGKFILYSIVDKAREKYRYSFEIDKTNINKNEILIIKKDIYSNKEDKVIRKYILSFEVSEKNDRTIVTKIKDCLETQKKEKFERENTRRLISETERKLLSEETQKTYSKIACCSPEDIDSVKIYKIKRYLAYRSNMLLFFSLINDIFVKGVVKDNGEEVGEIWRIIDSKEIDEKKTYDLLVENFKKRMSQEFINYKQSIENKIEKNTNKIKEIEQKLKKEKYKKEINRLKKQLIELNRENDLLEKDKIELSDEEIREDIEKILKIYSDLRHKLMHYNYQYFENLFENKKISKEKNEDVNLTELLDLNLFRYLPLVRQLKLENKTNYLEKEDKITVLGVSDSAIKYYSYYNFLCEQKNGFNNFINSFFSNDGEENKSFKEKINLSLEKEIEIMEKETNEKIKEINKNELQLMKEQKELGTAYVLDIHSLNDYKISHNERNKNVKLQNDIMNGNRDKNALDKINKKLVELKIKMDKITKRNSILRLKYKLQVAYGFLMEEYKGNIKKFKDEFDISKEKIKSYKSKGEKYLEVKSEKKYITKILNSIEDIHNITWLKNQEENNLFKFYVLTYILLPFEFRGDFLGFVKKHYYDIKNVEFLDENNDRLTPEQLEKMKNDSFFNKIRLFEKNSKKYDILKESILTSERIGKYFSLLNTGAKYFEYGGEENRGIFNKNIIIPIFKYYQIVLKLYNDVELAMLLTLSESDEKDINKIKELVTLKEKVSPKKIDYEKKYKFSVLLDCFNRIINLGKKDFLASEEVKEVAKTFTNLAYLRNKICHLNYSKFIDDLLTIDTNKSTTDSEGKLLINDRIRKLIKFIRENNQKMNISIDYNYINDYYMKKEKFIFGQRKQAKTIIDSGKKANKRNKAEELLKMYRVKKENINLIYELSKKLNELTKSELFLLDKKLLKDIDFTDVKIKNKSFFELKNDVKEVANIKQALQKHSSELIGIYKKEVIMAIKRSIVSKLIYDEEKVLSIIIYDKTNKKYEDFLLEIRRERDINKFQFLIDEKKEKLGYEKIIETKEKKKVVVKIQNNSELVSEPRIIKNKDKKKAKTPEEISKLGILDLTNHYCFNLKITL

SEQ ID NO: 577 - protein, 1137 aa, Artificial Sequence
  Fusobacterium necrophorum
MEKFRRQNRNSIIKIIISNYDTKGIKELKVRYRKQAQLDTFIIKTEIVNNDIFIKSIIEKAREKYRYSFLFDGEEKYHFKNKSSVEIVKKDIFSQTPDNMIRNYKITLKISEKNPRVVEAEIEDLMNSTILKDGRRSARREKSMTERKLIEEKVAKNYSLLANCPMEEVDSIKIYKIKRFLTYRSNMLLYFASINSFLCEGIKGKDNETEEIWHLKDNDVRKEKVRENFKNKLIQSTENYNSSLKNQIEEKEKLLRKEFKKGAFYRTIIKKLQQERIKELSEKSLTEDCEKIIKLYSKLRHSLMHYDYQYFENLFENKKNDDLMKDLNLDLFKSLPLIRKMKLNNKVNYLEDGDTLFVLQKTKKAKTLYQIYDALCEQKNGFNKFINDFFVSDGEENTVFKQIINEKFQSEMEFLEKRISESEKKNEKLKKKLDSMKAHFRNINSEDTKEAYFWDIHSSRNYKTKYNERKNLVNEYTELLGSSKEKKLLREEITKINRQLLKLKQEMEEITKKNSLFRLEYKMKIAFGFLFCEFDGNISKFKDEFDASNQEKIIQYHKNGEKYLTSFLKEEEKEKFNLEKMQKIIQKTEEEDWLLPETKNNLFKFYLLTYLLLPYELKGDFLGFVKKHYYDIKNVDFIDENQNNIQVSQTVEKQEDYFYHKIRLFEKNTKKYEIVKYSIVPNEKLKQYFEDLGIDIKYLTGSVESGEKWLGENLGIDIKYLTVEQKSEVSEEKNKKVSLKNNGMFNKTILLFVFKYYQIAFKLFNDIELYSLFFLREKSGKPLEIFRKELESKMKDGYLNFGQLLYVVYEVLVKNKDLDKILSKKIDYRKDKSFSPEIAYLRNFLSHLNYSKFLDNFMKINTNKSDENKEVLIPSIKIQKMIQFIEKCNLQNQIDFDFNFVNDFYMRKEKMFFIQLKQIFPDINSTEKQKMNEKEEILRNRYHLTDKKNEQIKDEHEAQSQLYEKILSLQKIYSSDKNNFYGRLKEEKLLFLEKQGKKKLSMEEIKDKIAGDISDLLGILKKEITRDIKDKLTEKFRYCEEKLLNLSFYNHQDKKKEESIRVFLIRDKNSDNFKFESILDDGSNKIFISKNGKEITIQCCDKVLETLIIEKNTLKISSNGKIISLIPHYSYSIDVKY

SEQ ID NO: 578 - protein, 1158 aa, Artificial Sequence
  Fusobacterium varium
MENKNKPNRGSIVRIIISNYDMKGIKELKVRYRKQAQLDTFILQTTLDKSNNSILINDFRVKAREKYRYSFTYDGKEKFSVPSNSIIVTKIDNAAPEKSKEIRKYKITLGIDEKCKTGSMITAAIEDLLEDDRVREGIRNPRRKASKTERKLITESICHNYAQITQCPVEEIDAVKIYKVKRFLSYRSNMLLFFALINDFLCKNLKNEKGEKINEIWEMENKGNNKKIDFDENYNILVAQIKEYFTKEIENYNNRIDNIIDKKELLKYSEEKEESEKNKKLEELNKLESQKLKILTDEEIKADVIKIIKIFSDLRHSLMHYEYKYFENLFENKKNEELAELLNLNLFKNLTLLRQMKIENKTNYLEGDEKFNILGKDVRAKNALGHYDLLVEQKNGFNNFINSFFVQDGTENLEFKKFIDENFIKAQKELEEDIKNCKESVKKLEKKLKENPKKSEDLEKKLEKKQKKLKELKKELEKMKQHYKRLNCAYVWDIHSSTVYKKLYNERKNLIEKYNKQLNGLQDKNAITGINAQLLRIKKEMEEITKSNSLFRLKYKMQIAYAFLEMEYEGNIAKFKNEFDCSKTEKIQEWLEKSEEYLNYCMEKEEDGKNYKFHFKEISEIKDTHNEEWLENTSENNLFKFYILTYLLLPMEFKGDFLGVVKKHYYDIKNVDFTDESEKELSQEQIDKMIGDSFFHKIRLFEKNTKRYEIIKYSILTSDEIKKYFELLELKVPYLEYKGIDEIGIFNKNIILPIFKYYQIIFRLYNDLEIHGLFNVSFDINKILSDLKSYGNENINFREFLYVIKQNNNSSTEEEYQKIWEKLESKYLKEPLLTPEKKEINKKTEKELKKLDGISFLRNKISHLEYEKIIEGVLKTAVNGENKKTSETNADKVFLNEKIKKIINFIKENELDKIELGFNFINDFFMKKEQFMFGQIKQVKEGNSDSITTERKRKEENNKRLKITYGLNYNNLSKIYEFSNTLREIVNSPLFLKDSTLLKKVDLSKVMLKEKPICSLQYENNTKLEDDIKRILLKDSSDIMGIYKAEVVKKLKEKLVLIFKYDEEKKIYVTVYDTSKAVPENISKEILVKRNNSKEEYFFEDNKKKYTTQYYTLEITKENELKVIPAKKLEGKEFKTEKKEENKLMLNNHYCFNVKIIY

SEQ ID NO: 579 - protein, 1385 aa, Leptotrichia sp oral taxon 879 str. F0557
MGNLFGHKRWYEVRDKKDFKIKRKVKVKRNYDGNKYILNINENNNKEKIDNNKFIGEFVNYKKNNNVLKEFKRKFHAGNILFKLKGKEEIIRIENNDDFLETEEVVLYIEVYGKSEKLKALEITKKKIIDEAIRQGITKDDKKIEIKRQENEEEIEIDIRDEYTNKTLNDCSIILRIIENDELETKKSIYEIFKNINMSLYKIIEKIIENETEKVFENRYYEEHLREKLLKDNKIDVILTNFMEIREKIKSNLEIMGFVKFYLNVSGDKKKSENKKMFVEKILNTNVDLTVEDIVDFIVKELKFWNITKRIEKVKKFNNEFLENRRNRTYIKSYVLLDKHEKFKIERENKKDKIVKFFVENIKNNSIKEKIEKILAEFKINELIKKLEKELKKGNCDTEIFGIFKKHYKVNFDSKKFSNKSDEEKELYKIIYRYLKGRIEKILVNEQKVRLKKMEKIEIEKILNESILSEKILKRVKQYTLEHIMYLGKLRHNDIVKMTVNTDDFSRLHAKEELDLELITFFASTNMELNKIFNGKEKVTDFFGFNLNGQKITLKEKVPSFKLNILKKLNFINNENNIDEKLSHFYSFQKEGYLLRNKILHNSYGNIQETKNLKGEYENVEKLIKELKVSDEEISKSLSLDVIFEGKVDIINKINSLKIGEYKDKKYLPSFSKIVLEITRKFREINKDKLFDIESEKIILNAVKYVNKILYEKITSNEENEFLKTLPDKLVKKSNNKKENKNLLSIEEYYKNAQVSSSKGDKKAIKKYQNKVTNAYLEYLENTFTEIIDFSKFNLNYDEIKTKIEERKDNKSKIIIDSISTNINITNDIEYIISIFALLNSNTYINKIRNRFFATSVWLEKQNGTKEYDYENIISILDEVLLINLLRENNITDILDLKNAIIDAKIVENDETYIKNYIFESNEEKLKKRLFCEELVDKEDIRKIFEDENFKFKSFIKKNEIGNFKINFGILSNLECNSEVEAKKIIGKNSKKLESFIQNIIDEYKSNIRTLFSSEFLEKYKEEIDNLVEDTESENKNKFEKIYYPKEHKNELYIYKKNLFLNIGNPNFDKIYGLISKDIKNVDTKILFDDDIKKNKISEIDAILKNLNDKLNGYSNDYKAKYVNKLKENDDFFAKNIQNENYSSFGEFEKDYNKVSEYKKIRDLVEFNYLNKIESYLIDINWKLAIQMARFERDMHYIVNGLRELGIIKLSGYNTGISRAYPKRNGSDGFYTTTAYYKFFDEESYKKFEKICYGFGIDLSENSEINKPENESIRNYISHFYIVRNPFADYSIAEQIDRVSNLLSYSTRYNNSTYASVFEVFKKDVNLDYDELKKKFRLIGNNDILERLMKPKKVSVLELESYNSDYIKNLIIELLTKIENTNDTL

SEQ ID NO: 580 - protein, 1389 aa, Leptotrichia shahii; identical to SEQ ID NO: 477

SEQ ID NO: 581 - protein, 1197 aa, Leptotrichia wadei F0279 (Lw2); identical to SEQ ID NO: 2

SEQ ID NO: 582 - protein, 1120 aa, Listeria seeligeri; identical to SEQ ID NO: 3

SEQ ID NO: 583 - protein, 1340 aa, Lachnospiraceae bacterium MA2020; identical to SEQ ID NO: 4

SEQ ID NO: 584 - protein, 1437 aa, Lachnospiraceae bacterium NK4A179; identical to SEQ ID NO: 5

SEQ ID NO: 585 - protein, 1385 aa, Clostridium aminophilum DSM 10710; identical to SEQ ID NO: 6

SEQ ID NO: 586 - protein, 1175 aa, Carnobacterium gallinarum DSM 4847; identical to SEQ ID NO: 7

SEQ ID NO: 587 - protein, 1164 aa, Carnobacterium gallinarum DSM 4847; identical to SEQ ID NO: 8

SEQ ID NO: 588 - protein, 1154 aa, Paludibacter propionicigenes WB4; identical to SEQ ID NO: 9

SEQ ID NO: 589 - protein, 970 aa, Listeria weihenstephanensis FSL R9-0317; identical to SEQ ID NO: 10

SEQ ID NO: 590 - protein, 1051 aa, Listeriaceae bacterium FSL M6-0635; identical to SEQ ID NO: 11

SEQ ID NO: 591 - protein, 1152 aa, Leptotrichia wadei F0279; identical to SEQ ID NO: 12

SEQ ID NO: 592 - protein, 1285 aa, Rhodobacter capsulatus SB1003; identical to SEQ ID NO: 13

SEQ ID NO: 593 - protein, 1285 aa, Rhodobacter capsulatus R121; identical to SEQ ID NO: 14

SEQ ID NO: 594 - protein, 1285 aa, Rhodobacter capsulatus DE442; identical to SEQ ID NO: 14

SEQ ID NO: 595 - protein, 1159 aa, Leptotrichia buccalis C-1013-b; identical to SEQ ID NO: 309

SEQ ID NO: 596 - protein, 1285 aa, Herbinix hemicellulosilytics; identical to SEQ ID NO: 310

SEQ ID NO: 597 - protein, 1344 aa, Eubacterium rectale; identical to SEQ ID NO: 311

SEQ ID NO: 598 - protein, 1373 aa, Eubacteriaceae bacterium CHKC1004; identical to SEQ ID NO: 312

SEQ ID NO: 599 - protein, 1276 aa, Blautia sp.; identical to SEQ ID NO: 319

SEQ ID NO: 600 - protein, 1385 aa, Leptotrichia sp.; identical to SEQ ID NO: 579

SEQ ID NO: 601 - protein, 1224 aa, Bergeyella zoohelcum; identical to SEQ ID NO: 326

SEQ ID NO: 602 - protein, 1126 aa, Prevotella intermedia; identical to SEQ ID NO: 327

SEQ ID NO: 603 - protein, 1127 aa, Prevotella buccae; identical to SEQ ID NO: 328

SEQ ID NO: 604 - protein, 953 aa, Alistipes sp.; identical to SEQ ID NO: 331

SEQ ID NO: 605 - protein, 1322 aa, Prevotella sp.; identical to SEQ ID NO: 332

SEQ ID NO: 606 - protein, 1095 aa, Riemerella anatipestifer; identical to SEQ ID NO: 334

SEQ ID NO: 607 - protein, 1124 aa, Prevotella aurantiaca; identical to SEQ ID NO: 335

SEQ ID NO: 608 - protein, 1151 aa, Prevotella saccharolytica; identical to SEQ ID NO: 336

SEQ ID NO: 609 - protein, 1120 aa, Prevotella intermedia; identical to SEQ ID NO: 338

SEQ ID NO: 610 - protein, 1199 aa, Capnocytophaga canimorsus; identical to SEQ ID NO: 339

SEQ ID NO: 611 - protein, 1175 aa, Porphyromonas gulae; identical to SEQ ID NO: 340

SEQ ID NO: 612 - protein, 1090 aa, Prevotella sp.; identical to SEQ ID NO: 341

SEQ ID NO: 613 - protein, 1150 aa, Flavobacterium branchiophilum; identical to SEQ ID NO: 342

SEQ ID NO: 614 - protein, 1119 aa, Porphyromonas gingivalis; identical to SEQ ID NO: 345

SEQ ID NO: 615 - protein, 1132 aa, Prevotella intermedia; identical to SEQ ID NO: 347

SEQ ID NO: 616 - protein, 1115 aa, Fusobacterium necrophorum; identical to SEQ ID NO: 575

SEQ ID NO: 617 - protein, 1111 aa, Fusobacterium necrophorum
MEKFRRQNRSSIIKIIISNYDTKGIKELKVRYRKQAQLDTFIIKTEIVNNDIFIKSIIEKAREKYRYSFLFDGEEKYHFKNKSSVEIVKKDIFSQTPDNMIRNYKITLKISEKNPRVVEAEIEDLMNSTILKDGRRSARREKSMTERKLIEEKVAENYSLLANCPMEEVDSIKIYKIKRFLTYRSNMLLYFASINSFLCEGIKGKDNETEEIWHLKDNDVRKEKVKENFKNKLIQSTENYNSSLKNQIEEKEKLLRKESKKGAFYRTIIKKLQQERIKELSEKSLTEDCEKIIKLYSELRHPLMHYDYQYFENLFENKENSELTKNLNLDIFKSLPLVRKMKLNNKVNYLEDNDTLFVLQKTKKAKTLYQIYDALCEQKNGFNKFINDFFVSDGEENTVFKQIINEKFQSEIEFLEKRISESEKKNEKLKKKLDSMKAHFRNINSEDTKEAYFWDIHSSRNYKTKYNERKNLVNEYTELLGSSKEKKLLREEITKINRQLLKLKQEMEEITKKNSLFRLEYKMKMAFGFLFCEFDGNISRFKDEFDASNQEKIIQYHKNGEKYLTYFLKEEEKEKFNLKKLQETIQKTGEENWLLPQNKNNLFKFYLLTYLLLPYELKGDFLGFVKKHYYDIKNVDFMDENQSSKIIESKEDDFYHKIRLFEKNTKKYEIVKYSIVPDKKLKQYFKDLGIDTKYLILDQKSEVSGEKNKKVSLKNNGMFNKTILLFVFKYYQIAFKLFNDIELYSLFFLREKSGKPFEVFLKELKDKMIGKQLNFGQLLYVVYEVLVKNKDLSEILSERIDYRKDMCFSAEIADLRNFLSHLNYSKFLDNFMKINTNKSDENKEVLIPSIKIQKMIKFIEECNLQSQIDFDFNFVNDFYMRKEKMFFIQLKQIFPDINSTEKQKMNEKEEILRNRYHLTDKKNEQIKDEHEAQSQLYEKILSLQKIYSSDKNNFYGRLKEEKLLFLEKQEKKKLSMEEIKDKIAGDISDLLGILKKEITRDIKDKLTEKFRYCEEKLLNLSFYNHQDKKKEESIRVFLIRDKNSDNFKFESILDDGSNKIFISKNGKEITIQCCDKVLETLIIEKNTLKISSNGKIISLIPHYSYSIDVKY

SEQ ID NO: 618 - protein, 1110 aa, Fusobacterium necrophorum BFTR-1; identical to SEQ ID NO: 571

SEQ ID NO: 619 - protein, 668 aa, Fusobacterium necrophorum; identical to SEQ ID NO: 567

SEQ ID NO: 620 - protein, 1121 aa, Fusobacterium perfoetens; identical to SEQ ID NO: 576

SEQ ID NO: 621 - protein, 897 aa, Fusobacterium ulcerans; identical to SEQ ID NO: 569

SEQ ID NO: 622 - protein, 1111 aa, Anaerosalibacter sp.ND1; identical to SEQ ID NO: 573

SEQ ID NO: 623 - DNA, 28 bp, Artificial Sequence
  Sythetic primer
  misc_feature (1)..(1): /56-FAM
  misc_feature (9)..(9): ZEN
aggaaacagctatgaccatgattacgcc

SEQ ID NO: 624 - DNA, 28 bp, Artificial Sequence
  Guide RNA
ctcacgaagaaagttgtgcaaccaaaca

SEQ ID NO: 625 - DNA, 28 bp, Artificial Sequence
  Guide RNA
tcttcaatctggttggtaatggatattt

SEQ ID NO: 626 - DNA, 28 bp, Artificial Sequence
  Guide RNA
gccaatttgttagtgtcctctataaatt

SEQ ID NO: 627 - DNA, 28 bp, Artificial Sequence
  Guide RNA
tatctcacagaccctatttgattttgcc

SEQ ID NO: 628 - DNA, 28 bp, Artificial Sequence
  Guide RNA
aaattcttcattaaattcaccatttttg

SEQ ID NO: 629 - DNA, 28 bp, Artificial Sequence
  Guide RNA
tatagtttaaacataactctctcaattc

SEQ ID NO: 630 - DNA, 28 bp, Artificial Sequence
  Guide RNA
atccaaaaagcctaggatccccggtgcg

SEQ ID NO: 631 - DNA, 28 bp, Artificial Sequence
  Guide RNA
agaatgtcaagttgtattggatggttat

SEQ ID NO: 632 - DNA, 28 bp, Artificial Sequence
  Guide RNA
aaagcagccttgttgtagtcaattagtc

SEQ ID NO: 633 - DNA, 28 bp, Artificial Sequence
  Guide RNA
tgatctctttcttctttttgtcccttac

SEQ ID NO: 634 - DNA, 28 bp, Artificial Sequence
  Guide RNA
tctctttcttctttttgtcccttactat

SEQ ID NO: 635 - DNA, 28 bp, Artificial Sequence
  Guide RNA
caatcaaatgcctaggatccactgtgcg

SEQ ID NO: 636 - DNA, 28 bp, Artificial Sequence
  Spacer Sequence
gttactcttcgtagggaggtggagagct

SEQ ID NO: 637 - DNA, 28 bp, Artificial Sequence
  Spacer sequence
ctggttggtaatggatatttacaaagag

SEQ ID NO: 638 - DNA, 28 bp, Artificial Sequence
  Spacer sequence
cagaaggtttaaacagtgcctgcaaagg

SEQ ID NO: 639 - DNA, 28 bp, Artificial Sequence
  Spacer sequence
agctgtcaaatttctgccagcaagattt

SEQ ID NO: 640 - DNA, 28 bp, Artificial Sequence
  Spacer sequence
gtggtatctggtaggatttcggccctgt

SEQ ID NO: 641 - DNA, 28 bp, Artificial Sequence
  Spacer sequence
ctctctggacttgccttgacccatcgct

SEQ ID NO: 642 - DNA, 28 bp, Artificial Sequence
  Spacer sequence
agcctcacgaagaaagttgtgcaaccaa

SEQ ID NO: 643 - DNA, 28 bp, Artificial Sequence
  Spacer sequence
tcagtcgatgtcctcggccaccgacccg

SEQ ID NO: 644 - DNA, 28 bp, Artificial Sequence
  Spacer sequence
tccccttgagtctaaacctgccccccac

SEQ ID NO: 645 - DNA, 28 bp, Artificial Sequence
  Spacer sequence
ctagatttgctaaaacaaagtctgcaat

SEQ ID NO: 646 - DNA, 28 bp, Artificial Sequence
  Spacer sequence
caaaagcgacagtggaatcagcagaata

SEQ ID NO: 647 - DNA, 28 bp, Artificial Sequence
  Spacer sequence
ggaggattacacttatctctgaacccaa

SEQ ID NO: 648 - DNA, 28 bp, Artificial Sequence
  Spacer sequence
cgatgcaggaagaggttcccaaggacat

SEQ ID NO: 649 - DNA, 28 bp, Artificial Sequence
  Spacer sequence
aagtcctgctagaaagactttcatgtcc

SEQ ID NO: 650 - DNA, 28 bp, Artificial Sequence
  Spacer sequence
tattttggacaaggtttcttccttcaaa

SEQ ID NO: 651 - DNA, 28 bp, Artificial Sequence
  Spacer sequence
agtggcacaggctcccactcaggtccaa

SEQ ID NO: 652 - DNA, 28 bp, Artificial Sequence
  Spacer sequence
aatcccatccagtattcttttggagccc

SEQ ID NO: 653 - DNA, 28 bp, Artificial Sequence
  Spacer sequence
caccaagtatcaagggatcttccatgta

SEQ ID NO: 654 - DNA, 28 bp, Artificial Sequence
  Spacer sequence
atatcaaagacaccatcgttcaccttga

SEQ ID NO: 655 - DNA, 28 bp, Artificial Sequence
  Spacer sequence
gtggaggcattcatccaacattcttcta

SEQ ID NO: 656 - DNA, 28 bp, Artificial Sequence
  Spacer sequence
gagagcatgataaaagttcagccacacc

SEQ ID NO: 657 - DNA, 28 bp, Artificial Sequence
  Spacer sequence
accaagaatatcaatgaaaatttcctta

SEQ ID NO: 658 - DNA, 28 bp, Artificial Sequence
  Spacer sequence
gtgcgtaaagtccactgaaattgaaaac

SEQ ID NO: 659 - DNA, 28 bp, Artificial Sequence
  Spacer sequence
tgagcatgtagtcccacagatcctttaa

SEQ ID NO: 660 - DNA, 28 bp, Artificial Sequence
  Spacer sequence
gtcaggccctgcctaatcaacatggcag

SEQ ID NO: 661 - DNA, 28 bp, Artificial Sequence
  Spacer sequence
tcggtaagagaaccacccaaaaccaaac

SEQ ID NO: 662 - DNA, 28 bp, Artificial Sequence
  Spacer sequence
gcctctccacatttttgttcaccacctt

SEQ ID NO: 663 - DNA, 28 bp, Artificial Sequence
  Spacer sequence
cccagtgcctcagcaccatcttcagatg

SEQ ID NO: 664 - DNA, 28 bp, Artificial Sequence
  Spacer sequence
ccatgaaaaattgcctaatgtcctggtt

SEQ ID NO: 665 - DNA, 28 bp, Artificial Sequence
  Spacer sequence
atgattcaaaatacacctgttttaagaa

SEQ ID NO: 666 - DNA, 28 bp, Artificial Sequence
  Spacer sequence
ctaacaacaaattcatcaaccagactgg

SEQ ID NO: 667 - DNA, 28 bp, Artificial Sequence
  Spacer sequence
ggcaaggtcagaaaacagaacagtgtaa

SEQ ID NO: 668 - DNA, 28 bp, Artificial Sequence
  Spacer sequence
caacatgagaaatgagtgacaaggattc

SEQ ID NO: 669 - DNA, 28 bp, Artificial Sequence
  Spacer sequence
cagaggtcaaggaatttaattctgggac

SEQ ID NO: 670 - DNA, 28 bp, Artificial Sequence
  Spacer sequence
catgtcagacataaatggaagaagctga

SEQ ID NO: 671 - DNA, 28 bp, Artificial Sequence
  Spacer sequence
accgcctcacagattgaatcacttggtt

SEQ ID NO: 672 - DNA, 28 bp, Artificial Sequence
  Spacer sequence
agccttgagctctcaggctttcttgcta

SEQ ID NO: 673 - DNA, 28 bp, Artificial Sequence
  Spacer sequence
cttaagagttaggttctcactgttattc

SEQ ID NO: 674 - DNA, 28 bp, Artificial Sequence
  Spacer sequence
ggacccaaacacccaactcaaaagagtt

SEQ ID NO: 675 - DNA, 28 bp, Artificial Sequence
  Spacer sequence
tcccaaagaagaggccttaaaaggcata

SEQ ID NO: 676 - DNA, 28 bp, Artificial Sequence
  Spacer sequence
atgagactgtttgtcacaaatgtacagc

SEQ ID NO: 677 - DNA, 28 bp, Artificial Sequence
  Spacer sequence
ctcttgtcacatgatcatctgtggttag

SEQ ID NO: 678 - DNA, 28 bp, Artificial Sequence
  Spacer sequence
tacagattttccctatttttgtttctca

SEQ ID NO: 679 - DNA, 28 bp, Artificial Sequence
  Spacer sequence
gcaaaggcctataaagccagatgagata

SEQ ID NO: 680 - DNA, 28 bp, Artificial Sequence
  Spacer sequence
tgattgcttctgacagcagcttctgtgc

SEQ ID NO: 681 - DNA, 28 bp, Artificial Sequence
  Spacer sequence
agtttgttctggagtgtcttgatcaatg

SEQ ID NO: 682 - DNA, 28 bp, Artificial Sequence
  Spacer sequence
agtcatcactgatggataaaccaccttt

SEQ ID NO: 683 - DNA, 28 bp, Artificial Sequence
  Spacer sequence
ggaacatttcattcaaattcaaccagtt

SEQ ID NO: 684 - DNA, 28 bp, Artificial Sequence
  Spacer sequence
tcttcttcaagaccgaggaggtctccca

SEQ ID NO: 685 - DNA, 28 bp, Artificial Sequence
  Spacer sequence
atctctgttaaataggtctaagaaaaat

SEQ ID NO: 686 - DNA, 28 bp, Artificial Sequence
  Spacer sequence
tgagcttatgatgcagtttccttacaag

SEQ ID NO: 687 - DNA, 28 bp, Artificial Sequence
  Spacer sequence
ttaggacacagttcctcaatgagtcttt

SEQ ID NO: 688 - DNA, 28 bp, Artificial Sequence
  Spacer sequence
atccagccaatctttcacatcagtgttg

SEQ ID NO: 689 - DNA, 28 bp, Artificial Sequence
  Spacer sequence
aagggaaattggcatactttaggaggtc

SEQ ID NO: 690 - DNA, 28 bp, Artificial Sequence
  Spacer sequence
ttaactagggagactgggacgccatttg

SEQ ID NO: 691 - DNA, 28 bp, Artificial Sequence
  Spacer sequence
atctattgtttcacaaagttgatgtggc

SEQ ID NO: 692 - DNA, 28 bp, Artificial Sequence
  Spacer sequence
gcgctgcagatacaaactttgtgagaag

SEQ ID NO: 693 - DNA, 28 bp, Artificial Sequence
  Spacer sequence
tagaatctagatttaaattctgcagcga

SEQ ID NO: 694 - DNA, 28 bp, Artificial Sequence
  Spacer sequence
gctgataaatttgtttaacaagccgctc

SEQ ID NO: 695 - DNA, 28 bp, Artificial Sequence
  Spacer sequence
ggacaaggacttcctccggatcacttac

SEQ ID NO: 696 - DNA, 28 bp, Artificial Sequence
  Spacer sequence
tcaaataaagtgatctgatcatcacttg

SEQ ID NO: 697 - DNA, 28 bp, Artificial Sequence
  Spacer sequence
gccaaagataacaccaatgcagtagttg

SEQ ID NO: 698 - DNA, 28 bp, Artificial Sequence
  Spacer sequence
catagaagtcagaagcattatgcaagat

SEQ ID NO: 699 - DNA, 28 bp, Artificial Sequence
  Spacer sequence
ctggatatatgggatggcactatcccca

SEQ ID NO: 700 - DNA, 28 bp, Artificial Sequence
  Spacer sequence
tctctcagtaacagttgtttctgaaccc

SEQ ID NO: 701 - DNA, 28 bp, Artificial Sequence
  Spacer sequence
tgacatatgatttcatcattgcattcac

SEQ ID NO: 702 - DNA, 28 bp, Artificial Sequence
  Spacer sequence
agcttatgcatgtgccaagttaacaaag

SEQ ID NO: 703 - DNA, 28 bp, Artificial Sequence
  Spacer sequence
acgcacatactggtcatcacctagtttg

SEQ ID NO: 704 - DNA, 28 bp, Artificial Sequence
  Spacer sequence
acaaaaatgggcacatcattggtcccca

SEQ ID NO: 705 - DNA, 28 bp, Artificial Sequence
  Spacer sequence
tttaagaacccttcccgcacattgatag

SEQ ID NO: 706 - DNA, 28 bp, Artificial Sequence
  Spacer sequence
aaattccttatcattgtttaaacaggag

SEQ ID NO: 707 - DNA, 28 bp, Artificial Sequence
  Spacer sequence
actcaaaataatcttctattaaccttgt

SEQ ID NO: 708 - DNA, 28 bp, Artificial Sequence
  Spacer sequence
ccaatatagagttctctatttcccccaa

SEQ ID NO: 709 - DNA, 28 bp, Artificial Sequence
  Spacer sequence
aaatttcagccttccagagtcaggacct

SEQ ID NO: 710 - DNA, 28 bp, Artificial Sequence
  Spacer sequence
attcttctgagtagaagcacagattttt

SEQ ID NO: 711 - DNA, 28 bp, Artificial Sequence
  Spacer sequence
gtcaacgacagagctttactaagggact

SEQ ID NO: 712 - DNA, 28 bp, Artificial Sequence
  Spacer sequence
gattctcacgtcttcttccagtttgtcc

SEQ ID NO: 713 - DNA, 28 bp, Artificial Sequence
  Spacer sequence
cttgcctttgcatatgcctgtatttccc

SEQ ID NO: 714 - DNA, 28 bp, Artificial Sequence
  Spacer sequence
tgcaacagaatcatcttcatgcaagaaa

SEQ ID NO: 715 - DNA, 28 bp, Artificial Sequence
  Spacer sequence
ctttctacaaaggttttttgccatctca

SEQ ID NO: 716 - DNA, 28 bp, Artificial Sequence
  Spacer sequence
tgactgaggtgaaatacaaaggtgacag

SEQ ID NO: 717 - DNA, 28 bp, Artificial Sequence
  Spacer sequence
tcacagataaatttcatgtcatcattgg

SEQ ID NO: 718 - DNA, 28 bp, Artificial Sequence
  Spacer sequence
ttctactaaatggaaagatatttctgac

SEQ ID NO: 719 - DNA, 28 bp, Artificial Sequence
  Spacer sequence
ccatcttccctgttagaataagctgtaa

SEQ ID NO: 720 - DNA, 28 bp, Artificial Sequence
  Spacer sequence
gtaagtttttctccatctcctttgtcat

SEQ ID NO: 721 - DNA, 28 bp, Artificial Sequence
  Spacer sequence
ccgtgctattgtggtgttgaccttttct

SEQ ID NO: 722 - DNA, 28 bp, Artificial Sequence
  Spacer sequence
tctcttcttctccatcaaaacatatttc

SEQ ID NO: 723 - DNA, 28 bp, Artificial Sequence
  Spacer sequence
cctgtctcttctcccttggaaccgatga

SEQ ID NO: 724 - DNA, 28 bp, Artificial Sequence
  Spacer sequence
aactttatattcatagtctgagtggctc

SEQ ID NO: 725 - DNA, 28 bp, Artificial Sequence
  Spacer sequence
cgaaactctccgtaatttgactcacagc

SEQ ID NO: 726 - DNA, 28 bp, Artificial Sequence
  Spacer sequence
tcatattccagaagtcgttctccattta

SEQ ID NO: 727 - DNA, 28 bp, Artificial Sequence
  Spacer sequence
tttgttactagcaagatctaatgctgtc

SEQ ID NO: 728 - DNA, 28 bp, Artificial Sequence
  Spacer sequence
gatctaggctgtttagcttcttctctcc

SEQ ID NO: 729 - DNA, 28 bp, Artificial Sequence
  Spacer sequence
ttaaatgaagacaccattaggctaaagg

SEQ ID NO: 730 - DNA, 28 bp, Artificial Sequence
  Spacer sequence
tgtatgctgacagtcaatttctttacta

SEQ ID NO: 731 - DNA, 28 bp, Artificial Sequence
  Spacer sequence
agaacacacattcttcctcaggagtgat

SEQ ID NO: 732 - DNA, 28 bp, Artificial Sequence
  Spacer sequence
aaaccaaattgacttttgggctcaaaga

SEQ ID NO: 733 - DNA, 28 bp, Artificial Sequence
  Spacer sequence
atctgttagcctgtcaggggtctccttt

SEQ ID NO: 734 - DNA, 28 bp, Artificial Sequence
  Spacer sequence
acacattcaacataaatttaaattttgc

SEQ ID NO: 735 - DNA, 28 bp, Artificial Sequence
  Spacer sequence
gtaccaaaaatagtttttattaggaatc

SEQ ID NO: 736 - DNA, 28 bp, Artificial Sequence
  Spacer sequence
ctcagcaggtgtgatcagatcctccctc

SEQ ID NO: 737 - DNA, 28 bp, Artificial Sequence
  Spacer sequence
atgagaaatctgacactattgccatcac

SEQ ID NO: 738 - DNA, 28 bp, Artificial Sequence
  Spacer sequence
tgcttttgatttctctttgttgggttgg

SEQ ID NO: 739 - DNA, 28 bp, Artificial Sequence
  Spacer sequence
cctcagtgcaacctcaatgtcggtgaga

SEQ ID NO: 740 - DNA, 28 bp, Artificial Sequence
  Spacer sequence
atctaatccatgaaatcatgatgtctat

SEQ ID NO: 741 - DNA, 28 bp, Artificial Sequence
  Spacer sequence
gaaaaaattggtaaaaagaaccttttag

SEQ ID NO: 742 - DNA, 28 bp, Artificial Sequence
  Spacer sequence
atgaccatccgggccttgtatggagtag

SEQ ID NO: 743 - DNA, 28 bp, Artificial Sequence
  Spacer sequence
tctggtataataggtggtattcttcaga

SEQ ID NO: 744 - DNA, 28 bp, Artificial Sequence
  Spacer sequence
aacacttctttgcattctaccacttgat

SEQ ID NO: 745 - DNA, 28 bp, Artificial Sequence
  Spacer sequence
ttgccttagtctagcaactgagctagtt

SEQ ID NO: 746 - DNA, 28 bp, Artificial Sequence
  Spacer sequence
gacaaacagatgataatcttctcaggct

SEQ ID NO: 747 - DNA, 28 bp, Artificial Sequence
  Spacer sequence
gtgctgggttggaaattgtaatcttcaa

SEQ ID NO: 748 - DNA, 28 bp, Artificial Sequence
  Spacer sequence
gtgagctccaattttcataaagttctca

SEQ ID NO: 749 - DNA, 28 bp, Artificial Sequence
  Spacer sequence
attcttgctcaaggtgttcagacagtcc

SEQ ID NO: 750 - DNA, 28 bp, Artificial Sequence
  Spacer sequence
accactaacaggcatttttgaatttttg

SEQ ID NO: 751 - DNA, 28 bp, Artificial Sequence
  Spacer sequence
cctaaacaattcctcaaaagacaccttt

SEQ ID NO: 752 - DNA, 28 bp, Artificial Sequence
  Spacer sequence
tattcctcaaaagtctaatgaactcctc

SEQ ID NO: 753 - DNA, 28 bp, Artificial Sequence
  Spacer sequence
agcctatcattcacactactatagcaac

SEQ ID NO: 754 - DNA, 28 bp, Artificial Sequence
  Spacer sequence
ttttaaccctttgaatttcgactgtttt

SEQ ID NO: 755 - DNA, 28 bp, Artificial Sequence
  Spacer sequence
catccagatttaacaactgtctccttct

SEQ ID NO: 756 - DNA, 28 bp, Artificial Sequence
  Spacer sequence
ttgactttgtttaacatagagaggagcc

SEQ ID NO: 757 - DNA, 28 bp, Artificial Sequence
  Spacer sequence
acttcccctttcgtgcccatgggtctct

SEQ ID NO: 758 - DNA, 28 bp, Artificial Sequence
  Spacer sequence
gacaggattccactgcctccctgcttaa

SEQ ID NO: 759 - DNA, 28 bp, Artificial Sequence
  Spacer sequence
gcaaggttttcatagagctcagagaatt

SEQ ID NO: 760 - DNA, 28 bp, Artificial Sequence
  Spacer sequence
tactttctgaaagtttctctttaatttc

SEQ ID NO: 761 - DNA, 28 bp, Artificial Sequence
  Spacer sequence
acctgctgaaaagagagtttattccaaa

SEQ ID NO: 762 - DNA, 28 bp, Artificial Sequence
  Spacer sequence
ttggggttgatgccttcgtggcacatcc

SEQ ID NO: 763 - DNA, 28 bp, Artificial Sequence
  Spacer sequence
tgacctcgcatctttcagaattttcata

SEQ ID NO: 764 - DNA, 28 bp, Artificial Sequence
  Spacer sequence
cgatagtagtcttcagggactcacagag

SEQ ID NO: 765 - DNA, 28 bp, Artificial Sequence
  Spacer sequence
aagactttctcattttggttagaatact

SEQ ID NO: 766 - DNA, 28 bp, Artificial Sequence
  Spacer sequence
tctaaatttgaagtttgcccactctggc

SEQ ID NO: 767 - DNA, 28 bp, Artificial Sequence
  Spacer sequence
aacgaccatctactattggaactaatgt

SEQ ID NO: 768 - DNA, 28 bp, Artificial Sequence
  Spacer sequence
tccctgatgcatgccaatttgttagtgt

SEQ ID NO: 769 - DNA, 28 bp, Artificial Sequence
  Spacer sequence
actggctggagtgctcctaacaaaacac

SEQ ID NO: 770 - DNA, 28 bp, Artificial Sequence
  Spacer sequence
ctatcagcttgtaaccatcaggaatgat

SEQ ID NO: 771 - DNA, 28 bp, Artificial Sequence
  Spacer sequence
attccagactccaccaaaattgtttcca

SEQ ID NO: 772 - DNA, 28 bp, Artificial Sequence
  Spacer sequence
tgtgcagccactcttgtctgcactgtct

SEQ ID NO: 773 - DNA, 28 bp, Artificial Sequence
  Spacer sequence
acttgagtccctcaatcagaaccattct

SEQ ID NO: 774 - DNA, 28 bp, Artificial Sequence
  Spacer sequence
ttgagtttctgccttgacaacctctcat

SEQ ID NO: 775 - DNA, 28 bp, Artificial Sequence
  Spacer sequence
taactctctcaattctgagatgatttca

SEQ ID NO: 776 - DNA, 28 bp, Artificial Sequence
  Spacer sequence
ttcagcgtcttttccagacggtttttac

SEQ ID NO: 777 - DNA, 28 bp, Artificial Sequence
  Spacer sequence
caactacaaattcctttgttggttaatc

SEQ ID NO: 778 - DNA, 28 bp, Artificial Sequence
  Spacer sequence
accttttatgtgcctgtgtgttggtatt

SEQ ID NO: 779 - DNA, 28 bp, Artificial Sequence
  Spacer sequence
tgactagatatgcagatgtggaaaacat

SEQ ID NO: 780 - DNA, 28 bp, Artificial Sequence
  Spacer sequence
ggggtactcccctgcctctttatgtaat

SEQ ID NO: 781 - DNA, 28 bp, Artificial Sequence
  Spacer sequence
catgttatcggcttcctgttcgatttga

SEQ ID NO: 782 - DNA, 28 bp, Artificial Sequence
  Spacer sequence
agtaagaaccattggtgacaagccagca

SEQ ID NO: 783 - DNA, 28 bp, Artificial Sequence
  Spacer sequence
gtctttgcatgttctaggtaccaaaact

SEQ ID NO: 784 - DNA, 28 bp, Artificial Sequence
  Spacer sequence
ccccatcagatctctcaagtggttcctc

SEQ ID NO: 785 - DNA, 28 bp, Artificial Sequence
  Spacer sequence
aagaattcactgttgttttgaataagtg

SEQ ID NO: 786 - DNA, 28 bp, Artificial Sequence
  Spacer sequence
ttgaacttactcaaagcagccttgttgt

SEQ ID NO: 787 - DNA, 28 bp, Artificial Sequence
  Spacer sequence
acagaattcttcatcatgatttacattg

SEQ ID NO: 788 - DNA, 28 bp, Artificial Sequence
  Spacer sequence
cgaaacacttaagctctgcagcaagaat

SEQ ID NO: 789 - DNA, 28 bp, Artificial Sequence
  Spacer sequence
ccacctggattctccacccctgaagagt

SEQ ID NO: 790 - DNA, 28 bp, Artificial Sequence
  Spacer sequence
gcccgctagtctcctagtgaagaactta

SEQ ID NO: 791 - DNA, 28 bp, Artificial Sequence
  Spacer sequence
tcctggacatcccaaaaggacctgcata

SEQ ID NO: 792 - DNA, 28 bp, Artificial Sequence
  Spacer sequence
ctattttgtataatcaggtattggtaac

SEQ ID NO: 793 - DNA, 28 bp, Artificial Sequence
  Spacer sequence
cttgccatctgagcctgtccagccccag

SEQ ID NO: 794 - DNA, 28 bp, Artificial Sequence
  Spacer sequence
cgaaggcagttctaaacatatctaggac

SEQ ID NO: 795 - DNA, 28 bp, Artificial Sequence
  Spacer sequence
tggctctgagcactttgtgcatttgaga

SEQ ID NO: 796 - DNA, 28 bp, Artificial Sequence
  Spacer sequence
tatgccattgttgaagtcgcaggatact

SEQ ID NO: 797 - DNA, 28 bp, Artificial Sequence
  Spacer sequence
tgatactgaggtgtaggctcgaaactat

SEQ ID NO: 798 - DNA, 28 bp, Artificial Sequence
  Spacer sequence
gtctttttattgaaggcagaggtcagat

SEQ ID NO: 799 - DNA, 28 bp, Artificial Sequence
  Spacer sequence
ggaatcattggtgaaggtcaattctagt

SEQ ID NO: 800 - DNA, 28 bp, Artificial Sequence
  Spacer sequence
aatggtgggagttgttggctgaacatgc

SEQ ID NO: 801 - DNA, 28 bp, Artificial Sequence
  Spacer sequence
tgtgacatatcaaactccactgacttaa

SEQ ID NO: 802 - DNA, 28 bp, Artificial Sequence
  Spacer sequence
gtcgggtcccttaagaccgtacatgcca

SEQ ID NO: 803 - DNA, 28 bp, Artificial Sequence
  Spacer sequence
ggaaactgatcaatgcgaatatcccaca

SEQ ID NO: 804 - DNA, 28 bp, Artificial Sequence
  Spacer sequence
ttgatacccgtgatcacgataagcacaa

SEQ ID NO: 805 - DNA, 28 bp, Artificial Sequence
  Spacer sequence
atcgatgatgtgaggcagagcctcaaac

SEQ ID NO: 806 - DNA, 28 bp, Artificial Sequence
  Spacer sequence
ttctgtaggatagggcctgacacccagt

SEQ ID NO: 807 - DNA, 25 bp, Artificial Sequence
  Spacer sequence
caaaaagcctaggatccccggtgcg

SEQ ID NO: 808 - DNA, 28 bp, Artificial Sequence
  Spacer sequence
cttagagtgtcacaacatttgggcctct

SEQ ID NO: 809 - DNA, 28 bp, Artificial Sequence
  Spacer sequence
atgttgtgaacagttttcagatctggga

SEQ ID NO: 810 - DNA, 28 bp, Artificial Sequence
  Spacer sequence
aaaaatgatgcagtccatgagtgcacag

SEQ ID NO: 811 - DNA, 28 bp, Artificial Sequence
  Spacer sequence
ttttgtcccttactattccagtatgcat

SEQ ID NO: 812 - DNA, 28 bp, Artificial Sequence
  Spacer sequence
tcccacactttgtcttcatactccctcg

SEQ ID NO: 813 - DNA, 28 bp, Artificial Sequence
  Spacer sequence
atcgataagcttaatgtccttcctattc

SEQ ID NO: 814 - DNA, 28 bp, Artificial Sequence
  Spacer sequence
tgtcatcggagccttgacagcttagaac

SEQ ID NO: 815 - DNA, 28 bp, Artificial Sequence
  Spacer sequence
ataactgacgaggtcaacccgggttgcg

SEQ ID NO: 816 - DNA, 28 bp, Artificial Sequence
  Spacer sequence
catgccgtgtgagtacttggaatcttgc

SEQ ID NO: 817 - DNA, 28 bp, Artificial Sequence
  Spacer sequence
gttccctgtaaaagtgtatgaactgccc

SEQ ID NO: 818 - DNA, 28 bp, Artificial Sequence
  Spacer sequence
atttccactggatcattaaatctaccct

SEQ ID NO: 819 - DNA, 28 bp, Artificial Sequence
  Spacer sequence
gttggggtcaattcctcccatgaggtct

SEQ ID NO: 820 - DNA, 28 bp, Artificial Sequence
  Spacer sequence
agcttaagcccacctgaggtggacctgc

SEQ ID NO: 821 - DNA, 28 bp, Artificial Sequence
  Spacer sequence
gagttgactgcaggtttctcgcttgtga

SEQ ID NO: 822 - DNA, 28 bp, Artificial Sequence
  Spacer sequence
tgctctccccacaatcgatgttctacaa

SEQ ID NO: 823 - DNA, 28 bp, Artificial Sequence
  Spacer sequence
ctgaaaggcaaactttatagaggatgtt

SEQ ID NO: 824 - DNA, 28 bp, Artificial Sequence
  Spacer sequence
acttggtctgaaacaaacatgttgagtt

SEQ ID NO: 825 - DNA, 28 bp, Artificial Sequence
  Spacer sequence
cttcaagaggtcctcgctgttgcttggc

SEQ ID NO: 826 - DNA, 28 bp, Artificial Sequence
  Spacer sequence
tgttacccccatccaacagggctgcccc

SEQ ID NO: 827 - DNA, 28 bp, Artificial Sequence
  Spacer sequence
ctaaagttatagccagaaatgttgatgc

SEQ ID NO: 828 - DNA, 28 bp, Artificial Sequence
  Spacer sequence
ccccagaactgggtgcttgtctttcagc

SEQ ID NO: 829 - DNA, 28 bp, Artificial Sequence
  Spacer sequence
gatacttgactgtgtaaagcaagccaag

SEQ ID NO: 830 - DNA, 28 bp, Artificial Sequence
  Spacer sequence
tcattgagcggagtctgtgactgtttgg

SEQ ID NO: 831 - DNA, 28 bp, Artificial Sequence
  Spacer sequence
tggcattgtgccaaattgattgttcaaa

SEQ ID NO: 832 - DNA, 28 bp, Artificial Sequence
  Spacer sequence
aaactcttaccacaccacttgcaccctg

SEQ ID NO: 833 - DNA, 28 bp, Artificial Sequence
  Spacer sequence
atctgtaggatctgagatctttggtcta

SEQ ID NO: 834 - DNA, 28 bp, Artificial Sequence
  Spacer sequence
catatatacccctgaagcctggggcctt

SEQ ID NO: 835 - DNA, 28 bp, Artificial Sequence
  Spacer sequence
tcagcttctcaaggtcagccgcaagaga

SEQ ID NO: 836 - DNA, 28 bp, Artificial Sequence
  Spacer sequence
ctccccactttcaaaacattcttctttg

SEQ ID NO: 837 - DNA, 28 bp, Artificial Sequence
  Spacer sequence
agaatgtacagtctggttgagacttctg

SEQ ID NO: 838 - DNA, 28 bp, Artificial Sequence
  Spacer sequence
ctctcttttccttcctcatgatcctctg

SEQ ID NO: 839 - DNA, 28 bp, Artificial Sequence
  Spacer sequence
tccaacccattcagaaggttggttgcat

SEQ ID NO: 840 - DNA, 28 bp, Artificial Sequence
  Spacer sequence
atctgatgtgaagctctgcaattctctt

SEQ ID NO: 841 - DNA, 28 bp, Artificial Sequence
  Spacer sequence
agctcttaacttccttagacaaggacat

SEQ ID NO: 842 - DNA, 28 bp, Artificial Sequence
  Spacer sequence
agacaaatgcgcaatcaaatgcctagga

SEQ ID NO: 843 - DNA, 28 bp, Artificial Sequence
  Spacer sequence
cgcaccgaggatcctaggctttttgatg

SEQ ID NO: 844 - DNA, 28 bp, Artificial Sequence
  Spacer sequence
ttgagggactcaagttgctgtcacgctg

SEQ ID NO: 845 - DNA, 28 bp, Artificial Sequence
  Spacer sequence
gttacaagctgatagacaattctctcat

SEQ ID NO: 846 - DNA, 28 bp, Artificial Sequence
  Spacer sequence
tagtagatggtcgttgtgattatgataa

SEQ ID NO: 847 - DNA, 28 bp, Artificial Sequence
  Spacer sequence
cgcaccgaggatcctaggctttttgatg

SEQ ID NO: 848 - DNA, 28 bp, Artificial Sequence
  Spacer sequence
ttgagggactcaagttgctgtcacgctg

SEQ ID NO: 849 - DNA, 28 bp, Artificial Sequence
  Spacer sequence
gttacaagctgatagacaattctctcat

SEQ ID NO: 850 - DNA, 28 bp, Artificial Sequence
  Spacer sequence
tagtagatggtcgttgtgattatgataa

SEQ ID NO: 851 - DNA, 28 bp, Artificial Sequence
  Spacer sequence
tgaagactactatcgacaagcgctccgg

SEQ ID NO: 852 - DNA, 28 bp, Artificial Sequence
  Spacer sequence
ctcttttcagcaggtttagaagagattt

SEQ ID NO: 853 - DNA, 28 bp, Artificial Sequence
  Spacer sequence
cagtggaatcctgtcctttgatgagatt

SEQ ID NO: 854 - DNA, 28 bp, Artificial Sequence
  Spacer sequence
tgttaaatctggatgttttgtgtctttc

SEQ ID NO: 855 - DNA, 28 bp, Artificial Sequence
  Spacer sequence
gacttttgaggaatagaaaaaagtcaaa

SEQ ID NO: 856 - DNA, 28 bp, Artificial Sequence
  Spacer sequence
accttgagcaagaatgccacataccatt

SEQ ID NO: 857 - DNA, 28 bp, Artificial Sequence
  Spacer sequence
tatcatctgtttgtctggccttaacaaa

SEQ ID NO: 858 - DNA, 28 bp, Artificial Sequence
  Spacer sequence
acctattataccagaagactggagaatc

SEQ ID NO: 859 - DNA, 28 bp, Artificial Sequence
  Spacer sequence
tttcatggattagatcatgtcctgattt

SEQ ID NO: 860 - DNA, 28 bp, Artificial Sequence
  Spacer sequence
tgtcagatttctcatctacatcattaat

SEQ ID NO: 861 - DNA, 28 bp, Artificial Sequence
  Spacer sequence
ttatgttgaatgtgtcatacctgtgtca

SEQ ID NO: 862 - DNA, 28 bp, Artificial Sequence
  Spacer sequence
aagaatgtgtgttctatgagcaaatgaa

SEQ ID NO: 863 - DNA, 28 bp, Artificial Sequence
  Spacer sequence
taaacagcctagatcccatgactaactc

SEQ ID NO: 864 - DNA, 28 bp, Artificial Sequence
  Spacer sequence
ttacggagagtttcgtaagaaaacaaaa

SEQ ID NO: 865 - DNA, 28 bp, Artificial Sequence
  Spacer sequence
atggagaagaagagacaagcttcttcaa

SEQ ID NO: 866 - DNA, 28 bp, Artificial Sequence
  Spacer sequence
taacagggaagatggctcacttaagaaa

SEQ ID NO: 867 - DNA, 28 bp, Artificial Sequence
  Spacer sequence
atttcacctcagtcattaaagatcagtg

SEQ ID NO: 868 - DNA, 28 bp, Artificial Sequence
  Spacer sequence
atatgcaaaggcaaggcttgaatttcaa

SEQ ID NO: 869 - DNA, 28 bp, Artificial Sequence
  Spacer sequence
tctactcagaagaatcaccaacatcata

SEQ ID NO: 870 - DNA, 28 bp, Artificial Sequence
  Spacer sequence
aagattattttgagtctttttcaagttt

SEQ ID NO: 871 - DNA, 28 bp, Artificial Sequence
  Spacer sequence
tgtgcccatttttgttcttaatgtttct

SEQ ID NO: 872 - DNA, 28 bp, Artificial Sequence
  Spacer sequence
tgaaatcatatgtcaagtcgaagctaaa

SEQ ID NO: 873 - DNA, 28 bp, Artificial Sequence
  Spacer sequence
cttctgacttctatggtttgcttagcga

SEQ ID NO: 874 - DNA, 28 bp, Artificial Sequence
  Spacer sequence
aggaagtccttgtcctgttggaattcca

SEQ ID NO: 875 - DNA, 28 bp, Artificial Sequence
  Spacer sequence
ttgtatctgcagcgctacacaatgtcaa

SEQ ID NO: 876 - DNA, 28 bp, Artificial Sequence
  Spacer sequence
atgccaatttccctttggatccatttct

SEQ ID NO: 877 - DNA, 28 bp, Artificial Sequence
  Spacer sequence
tgcatcataagctcaaaaatggtgaatt

SEQ ID NO: 878 - DNA, 28 bp, Artificial Sequence
  Spacer sequence
tgaatgaaatgttcccattaaggatggt

SEQ ID NO: 879 - DNA, 28 bp, Artificial Sequence
  Spacer sequence
tgtcagaagcaatcaacaagtcagcttt

SEQ ID NO: 880 - DNA, 28 bp, Artificial Sequence
  Spacer sequence
atcatgtgacaagagtttgcaatcggga

SEQ ID NO: 881 - DNA, 28 bp, Artificial Sequence
  Spacer sequence
tgggtgtttgggtcctagcagaaccgac

SEQ ID NO: 882 - DNA, 28 bp, Artificial Sequence
  Spacer sequence
aatctgtgaggcggttatatcccaagat

SEQ ID NO: 883 - DNA, 28 bp, Artificial Sequence
  Spacer sequence
tcatttctcatgttgttaagtggaaaag

SEQ ID NO: 884 - DNA, 28 bp, Artificial Sequence
  Spacer sequence
tgtattttgaatcatttgttcgagaatt

SEQ ID NO: 885 - DNA, 28 bp, Artificial Sequence
  Spacer sequence
aaaatgtggagaggcctatgtttaggaa

SEQ ID NO: 886 - DNA, 28 bp, Artificial Sequence
  Spacer sequence
gggactacatgctcaactacacaaaagg

SEQ ID NO: 887 - DNA, 28 bp, Artificial Sequence
  Spacer sequence
ttttatcatgctctcacctctttaaggg

SEQ ID NO: 888 - DNA, 28 bp, Artificial Sequence
  Spacer sequence
ccttgatacttggtgattctcttgagct

SEQ ID NO: 889 - DNA, 28 bp, Artificial Sequence
  Spacer sequence
accttgtccaaaatatcattgtgaagct

SEQ ID NO: 890 - DNA, 28 bp, Artificial Sequence
  Spacer sequence
taagtgtaatcctccaggaactatgtat

SEQ ID NO: 891 - DNA, 28 bp, Artificial Sequence
  Spacer sequence
ttagactcaaggggaggtcctgcgacga

SEQ ID NO: 892 - DNA, 28 bp, Artificial Sequence
  Spacer sequence
gtgggtgtgtgtgtgtgtgtgtgtgcgt

SEQ ID NO: 893 - DNA, 28 bp, Artificial Sequence
  Spacer sequence
tgttgatatcttcaatctggttggtaat

SEQ ID NO: 894 - DNA, 28 bp, Artificial Sequence
  Spacer sequence
taaagggccaagataggtggtatctggt

SEQ ID NO: 895 - DNA, 28 bp, Artificial Sequence
  Spacer sequence
caactaaacgcctaggatccccggtgcg

SEQ ID NO: 896 - DNA, 28 bp, Artificial Sequence
  Spacer sequence
cgcaccggggatcctaggctttttggat

SEQ ID NO: 897 - DNA, 28 bp, Artificial Sequence
  Spacer sequence
tgcttatcgtgatcacgggtatcaaggc

SEQ ID NO: 898 - DNA, 28 bp, Artificial Sequence
  Spacer sequence
agtcagtggagtttgatatgtcacatct

SEQ ID NO: 899 - DNA, 28 bp, Artificial Sequence
  Spacer sequence
tgacctctgccttcaataaaaagacctt

SEQ ID NO: 900 - DNA, 28 bp, Artificial Sequence
  Spacer sequence
caaatgcacaaagtgctcagagccagtg

SEQ ID NO: 901 - DNA, 28 bp, Artificial Sequence
  Spacer sequence
accaatacctgattatacaaaatagaac

SEQ ID NO: 902 - DNA, 28 bp, Artificial Sequence
  Spacer sequence
cttcaggggtggagaatccaggtggtta

SEQ ID NO: 903 - DNA, 28 bp, Artificial Sequence
  Spacer sequence
acaaggctgctttgagtaagttcaaaga

SEQ ID NO: 904 - DNA, 28 bp, Artificial Sequence
  Spacer sequence
tttggtacctagaacatgcaaagaccgg

SEQ ID NO: 905 - DNA, 28 bp, Artificial Sequence
  Spacer sequence
acataaagaggcaggggagtacccccct

SEQ ID NO: 906 - DNA, 28 bp, Artificial Sequence
  Spacer sequence
taaccaacaaaggaatttgtagttgtgg

SEQ ID NO: 907 - DNA, 28 bp, Artificial Sequence
  Spacer sequence
cgcacagtggatcctaggcatttgattg

SEQ ID NO: 908 - DNA, 28 bp, Artificial Sequence
  Spacer sequence
tgtcattaaggatgcaaccaaccttctg

SEQ ID NO: 909 - DNA, 28 bp, Artificial Sequence
  Spacer sequence
aaagtcaacatcaaagaagaatgttttg

SEQ ID NO: 910 - DNA, 28 bp, Artificial Sequence
  Spacer sequence
aacacagcaactagaccaaagatctcag

SEQ ID NO: 911 - DNA, 28 bp, Artificial Sequence
  Spacer sequence
ggcttgtatggccaaacagtcacagact

SEQ ID NO: 912 - DNA, 28 bp, Artificial Sequence
  Spacer sequence
acagcagtccagcatcaacatttctggc

SEQ ID NO: 913 - DNA, 28 bp, Artificial Sequence
  Spacer sequence
ggccaagagaaaactcaacatgtttgtt

SEQ ID NO: 914 - DNA, 28 bp, Artificial Sequence
  Spacer sequence
aacaattgatctcacaagcgagaaacct

SEQ ID NO: 915 - DNA, 28 bp, Artificial Sequence
  Spacer sequence
gattgacattgagggtagatttaatgat

SEQ ID NO: 916 - DNA, 28 bp, Artificial Sequence
  Spacer sequence
cctcttcaatgcgcaacccgggttgacc

SEQ ID NO: 917 - DNA, 28 bp, Artificial Sequence
  Spacer sequence
cagggaagcttcgagggagtatgaagac

SEQ ID NO: 918 - DNA, 28 bp, Artificial Sequence
  Spacer sequence
caaagcaaggctcccagatctgaaaact

SEQ ID NO: 919 - DNA, 25 bp, Artificial Sequence
  T7 promoter
gaaattaatacgactcactataggg

SEQ ID NO: 920 - DNA, 400 bp, Zikv Brazil
ctcatcaatagatggggttcagtggggaaaaaagaggctatggaaataataaagaagttcaagaaagatctggctgccatgctgagaataatcaatgctaggaaggagaagaagagacggggcgcagatactagtgtcggaattgttggcctcctgctgaccacagctatggcagcggaggtcactagacgtgggagtgcatactatatgtacttggacagaaacgatgctggggaggccatatcttttccaaccacattggggatgaataagtgttatatacagatcatggatcttggacacatgtgtgatgccaccatgagctatgaatgccctatgctggatgagggggtggaaccagatgacgtcgattgttggtgcaacacgacgtcaacttggg

SEQ ID NO: 921 - DNA, 400 bp, Zikv Brazil
ctcatcaatagatggggttcagtggggaaaaaagaggctatggaaataataaagaagttcaagaaagatctggctgccatgctgagaataatcaatgctaggaaggagaagaagagacggggcgcagatactagtgtcggaattgttggcctcctgctgaccacagctatggcagcggaggtcactagacgtgggagtgcatactatatgtacttggacagaagcgatgctggggaggccatatcttttccaaccacattggggatgaataagtgttatatacagatcatggatcttggacacatgtgtgatgccaccatgagctatgaatgccctatgctggatgagggggtggaaccagatgacgtcgattgttggtgcaacacgacgtcaacttggg

SEQ ID NO: 922 - DNA, 425 bp, T7 Promoter Zikv Brazil
gaaattaatacgactcactatagggctcatcaatagatggggttcagtggggaaaaaagaggctatggaaataataaagaagttcaagaaagatctggctgccatgctgagaataatcaatgctaggaaggagaagaagagacggggcgcagatactagtgtcggaattgttggcctcctgctgaccacagctatggcagcggaggtcactagacgtgggagtgcatactatatgtacttggacagaaacgatgctggggaggccatatcttttccaaccacattggggatgaataagtgttatatacagatcatggatcttggacacatgtgtgatgccaccatgagctatgaatgccctatgctggatgagggggtggaaccagatgacgtcgattgttggtgcaacacgacgtcaacttggg

SEQ ID NO: 923 - DNA, 425 bp, T7 Promoter Zikv Brazil
gaaattaatacgactcactatagggctcatcaatagatggggttcagtggggaaaaaagaggctatggaaataataaagaagttcaagaaagatctggctgccatgctgagaataatcaatgctaggaaggagaagaagagacggggcgcagatactagtgtcggaattgttggcctcctgctgaccacagctatggcagcggaggtcactagacgtgggagtgcatactatatgtacttggacagaagcgatgctggggaggccatatcttttccaaccacattggggatgaataagtgttatatacagatcatggatcttggacacatgtgtgatgccaccatgagctatgaatgccctatgctggatgagggggtggaaccagatgacgtcgattgttggtgcaacacgacgtcaacttggg

SEQ ID NO: 924 - DNA, 25 bp, Artificial Sequence
  RPA primers
gaaattaatacgactcactataggg

SEQ ID NO: 925 - DNA, 45 bp, Artificial Sequence; identical to SEQ ID NO: 22
  RPA primers

SEQ ID NO: 926 - DNA, 30 bp, Artificial Sequence; identical to SEQ ID NO: 23
  RPA primers

SEQ ID NO: 927 - DNA, 59 bp, Artificial Sequence
  RPA primers
gaaattaatacgactcactatagggaacagcatattgacgctgggagagaccagagatc

SEQ ID NO: 928 - DNA, 36 bp, Artificial Sequence
  RPA primers
attcaacagcaccattccattttctggcgttctgtg

SEQ ID NO: 929 - DNA, 55 bp, Artificial Sequence
  RPA primers
gaaattaatacgactcactatagggcacaaaaacagcatattgacgctgggaaag

SEQ ID NO: 930 - DNA, 29 bp, Artificial Sequence
  RPA primers
catcttgcggcgctctgtgcctggattga

SEQ ID NO: 931 - DNA, 55 bp, Artificial Sequence
  RPA primers
gaaattaatacgactcactataggggtacaacatgatggggaaragagaraaraa

SEQ ID NO: 932 - DNA, 30 bp, Artificial Sequence
  RPA primers
  misc_feature (15)..(15): n is a, c, g, or t
cgkgtgtcccagccngckgtgtcatcwgca

SEQ ID NO: 933 - DNA, 53 bp, Artificial Sequence
  RPA primers
gaaattaatacgactcactatagggttgagcaaaccgtgctgcctgtagctcc

SEQ ID NO: 934 - DNA, 27 bp, Artificial Sequence
  RPA primers
gggaggggtctcctctaaccrctagtc

SEQ ID NO: 935 - DNA, 55 bp, Artificial Sequence
  RPA primers
gaaattaatacgactcactatagggactgtcttagacttgcatcctggagctggg

SEQ ID NO: 936 - DNA, 30 bp, Artificial Sequence
  RPA primers
cttcctccatttcagcagcgacaaccctgg

SEQ ID NO: 937 - DNA, 55 bp, Artificial Sequence
  RPA primers
gaaattaatacgactcactatagggtagagtcgaaaattggatattcaggaaccc

SEQ ID NO: 938 - DNA, 33 bp, Artificial Sequence
  RPA primers
  misc_feature (33)..(33): n is a, c, g, or t
aacccaagtcccacctgacataccttccacsdn

SEQ ID NO: 939 - DNA, 55 bp, Artificial Sequence
  RPA primers
gaaattaatacgactcactatagggtggaagagaatggagttcaactgacggtcg

SEQ ID NO: 940 - DNA, 30 bp, Artificial Sequence
  RPA primers
gaagtgcgatttcccccaagccttccagcc

SEQ ID NO: 941 - DNA, 45 bp, Artificial Sequence
  RPA primers
gaaattaatacgactcactatagggtactagtgtcggaattgttg

SEQ ID NO: 942 - DNA, 28 bp, Artificial Sequence
  RPA primers
taacacttattcatccccaatgtggttg

SEQ ID NO: 943 - DNA, 55 bp, Artificial Sequence
  RPA primers
gaaattaatacgactcactatagggttgggcctgaaaatccatacaatactccag

SEQ ID NO: 944 - DNA, 29 bp, Artificial Sequence
  RPA primers
aaaatatgcatcacccacatccagtactg

SEQ ID NO: 945 - DNA, 56 bp, Artificial Sequence
  RPA primers
gaaattaatacgactcactatagggaggatcaccagcaatattccaaagtagcatg

SEQ ID NO: 946 - DNA, 30 bp, Artificial Sequence
  RPA primers
ttgttctatgctgccctatttctaagtcag

SEQ ID NO: 947 - RNA, 36 nt, Artificial Sequence
  crRNA spacer
gauuuagacuaccccaaaaacgaaggggacuaaaac

SEQ ID NO: 948 - DNA, 25 bp, Artificial Sequence
  crRNA spacer
gaaattaatacgactcactataggg

SEQ ID NO: 949 - RNA, 28 nt, Artificial Sequence
  crRNA spacer
ugcugccugcagcccugggaucaaguac

SEQ ID NO: 950 - RNA, 28 nt, Artificial Sequence
  crRNA spacer
uggaaugaugcuguagagacagcaggau

SEQ ID NO: 951 - RNA, 28 nt, Artificial Sequence
  crRNA spacer
gaggagacagcaggaucucuggucuuuc

SEQ ID NO: 952 - RNA, 28 nt, Artificial Sequence
  crRNA spacer
uggauugauguugcagagacagcaggau

SEQ ID NO: 953 - RNA, 28 nt, Artificial Sequence
  crRNA spacer
uccuccugguaugcgacucaucucuucu

SEQ ID NO: 954 - RNA, 28 nt, Artificial Sequence
  crRNA spacer
ucccccuggaaucuuugauaugucucug

SEQ ID NO: 955 - RNA, 28 nt, Artificial Sequence
  crRNA spacer
gcccccaggccgggugccaacuucacgc

SEQ ID NO: 956 - RNA, 28 nt, Artificial Sequence
  crRNA spacer
auucucucuggaugcccaguggucuuca

SEQ ID NO: 957 - RNA, 28 nt, Artificial Sequence
  crRNA spacer
auggguugcagccucccggguuuuuaca

SEQ ID NO: 958 - RNA, 28 nt, Artificial Sequence
  crRNA spacer
ggccucccagauuuuuuacaccuucuca

SEQ ID NO: 959 - RNA, 28 nt, Artificial Sequence
  crRNA spacer
cacgguuugcagccucccaggcuuuacg

SEQ ID NO: 960 - RNA, 28 nt, Artificial Sequence
  crRNA spacer
uggcgcauggccucccugggaauuuuac

SEQ ID NO: 961 - RNA, 28 nt, Artificial Sequence
  crRNA spacer
auggguucacggacuauuucaggaagaa

SEQ ID NO: 962 - RNA, 28 nt, Artificial Sequence
  crRNA spacer
auagguucacggacuauuucaggaagaa

SEQ ID NO: 963 - RNA, 28 nt, Artificial Sequence
  crRNA spacer
augaguuuuuggcucguugagcuuccca

SEQ ID NO: 964 - RNA, 28 nt, Artificial Sequence
  crRNA spacer
auaaguuuuuggcucguugagcuuccca

SEQ ID NO: 965 - RNA, 28 nt, Artificial Sequence
  crRNA spacer
gaccacuccacaugggguuuuuuacaga

SEQ ID NO: 966 - RNA, 28 nt, Artificial Sequence
  crRNA spacer
gagcacuccacaugggguuuuuuacaga

SEQ ID NO: 967 - RNA, 28 nt, Artificial Sequence
  crRNA spacer
cguuacuguccaaguacauyuaguaugc

SEQ ID NO: 968 - RNA, 28 nt, Artificial Sequence
  crRNA spacer
cgcuacuguccaaguacauyuaguaugc

SEQ ID NO: 969 - RNA, 28 nt, Artificial Sequence
  crRNA spacer
gcaucguuucuguccaaguacauyuagu

SEQ ID NO: 970 - RNA, 28 nt, Artificial Sequence
  crRNA spacer
gcaucgcuucuguccaaguacauyuagu

SEQ ID NO: 971 - RNA, 28 nt, Artificial Sequence
  crRNA spacer
uuuuguuuauggcaaauacuggaguauu

SEQ ID NO: 972 - RNA, 28 nt, Artificial Sequence
  crRNA spacer
uucuguuuauggcaaauacuggaguauu

SEQ ID NO: 973 - RNA, 28 nt, Artificial Sequence
  crRNA spacer
uuuuacuuuuuuaacccugcgggaugug

SEQ ID NO: 974 - RNA, 28 nt, Artificial Sequence
  crRNA spacer
uuguacuuuuuuaacccugcgggaugug

SEQ ID NO: 975 - RNA, 28 nt, Artificial Sequence
  crRNA spacer
guuacugauuuuuucuuuuuuaacccug

SEQ ID NO: 976 - RNA, 28 nt, Artificial Sequence
  crRNA spacer
gucauugauuuuuucuuuuuuaacccug

SEQ ID NO: 977 - RNA, 28 nt, Artificial Sequence
  crRNA spacer
gauacauaacuaugucuggauuuuguuu

SEQ ID NO: 978 - RNA, 28 nt, Artificial Sequence
  crRNA spacer
gacacauaacuaugucuggauuuuguuu

SEQ ID NO: 979 - RNA, 28 nt, Artificial Sequence
  crRNA spacer
caugaauugauagauaacuaugucugga

SEQ ID NO: 980 - RNA, 28 nt, Artificial Sequence
  crRNA spacer
cacgaauugauagauaacuaugucugga

SEQ ID NO: 981 - RNA, 28 nt, Artificial Sequence
  crRNA spacer
auccaacauacaaaucauccauguauug

SEQ ID NO: 982 - RNA, 28 nt, Artificial Sequence
  crRNA spacer
augcaacauacaaaucauccauguauug

SEQ ID NO: 983 - DNA, 25 bp, Artificial Sequence
  Synthetic
gaaattaatacgactcactataggg

SEQ ID NO: 984 - DNA, 469 bp, Artificial Sequence
  Synthetic
gaaattaatacgactcactataggggtggaagactgcagtggaagctgtgaacgatccaaggttctgggctctagtggacaaggaaagagagcaccacctgagaggagagtgccagagttgtgtgtacaacatgatgggaaaaagagaaaagaaacaaggggaatttggaaaggccaagggcagccgcgccatctggtatatgtggctaggggctagatttctagagttcgaagcccttggattcttgaacgaggatcactggatggggagagagaactcaggaggtggtgttgaagggctgggattacaaagactcggatatgtcctagaagagatgagtcgcataccaggaggaaggatgtatgcagatgacactgctggctgggacacccgcatcagcaggtttgatctggagaatgaagctctaatcaccaaccaaatggagaaagggcacagggccttggcatt

SEQ ID NO: 985 - DNA, 469 bp, Artificial Sequence
  Synthetic
gaaattaatacgactcactatagggatggaactcagcaaaagaggcagtggaagatgaacggttctgggaccttgtgcacagagagagggagcttcataaacaaggaaaatgtgccacgtgtgtctacaacatgatgggaaagagagagaaaaaattaggagagttcggaaaggcaaaaggaagtcgcgcaatatggtacatgtggttgggagcgcgctttttagagtttgaagcccttggtttcatgaatgaagatcactggttcagcagagagaattcactcagtggagtggaaggagaaggactccacaaacttggatacatactcagagacatatcaaagattccagggggaaatatgtatgcagatgacacagccggatgggacacaagaataacagaggatgatcttcagaatgaggccaaaatcactgacatcatggaacctgaacatgccctattggccac

SEQ ID NO: 986 - DNA, 490 bp, Artificial Sequence
  Synthetic
gaaattaatacgactcactatagggatggaggagcgccagagaagcagttgaagatccaaaattttgggagatggtggatgaggagcgcgaggcacatctgcggggggaatgtcacacttgcatttacaacatgatgggaaagagagagaaaaaacccggagagttcggaaaggccaagggaagcagagccatttggttcatgtggctcggagctcgctttctggagttcgaggctctgggttttctcaatgaagaccactggcttggaagaaagaactcaggaggaggtgtcgagggcttgggcctccaaaaactgggttacatcctgcgtgaagttggcacccggcctgggggcaagatctatgctgatgacacagctggctgggacacccgcatcacgagagctgacttggaaaatgaagctaaggtgcttgagctgcttgatggggaacatcggcgtcttgccagggccatcattgagctcaccta

SEQ ID NO: 987 - DNA, 469 bp, Artificial Sequence
  Synthetic
gaaattaatacgactcactatagggatggaagacagccaatgaagcagtccaagaccccaagttttgggagatggttgacgctgagcgcaagctccatcaacaggggcggtgccagtcttgtgtctataacatgatgggaaagagagagaaaaaattatctgaatttggtaaagcaaaaggaagccgtgccatctggtacatgtggctgggggcgcgtttcctcgagtttgaagctcttgggttcctgaatgaagaccactgggcatccagagagaattcaggaggaggtgttgaaggcataggactccaatatctaggctatgtaatcaaggacctatccaccaaagaagggggaggattctatgctgatgacacagcaggatgggacacacgtatcacggaagctgacctagacgatgagcaggagatcatgagctacatgaacgctgagcagaggaaactggcttg

SEQ ID NO: 988 - DNA, 498 bp, Artificial Sequence
  Synthetic
gaaattaatacgactcactatagggcactctggtaagtcaacacattcacaaaacaaaggaaaataagaaatcaaacaaggcaagaagtcaggccggattaagccatagtacggtaagagctatgctgcctgtgagccccgtctaaggacgtaaaatgaagtcaggccggaagccacggtttgagcaaaccgtgctgcctgtagctccatcgtggggatgtaaaaacccgggaggctgcaacccatggaagctgtacgcatggggtagcagactagtggttagaggagacccctcccaaaacacaacgcagcagcggggcccaacaccaggggaagctgtaccctggtggtaaggactagaggttagaggagaccccccgcacaacaataaacagcatattgacgctgggagagaccagagatcctgctgtctctacagcatcattccaggcacagaacgccagaaaatggaatggtgctgttgaatcaacaggttct

SEQ ID NO: 989 - DNA, 498 bp, Artificial Sequence
  Synthetic
gaaattaatacgactcactatagggagaggcaggagtcctgtggtagaaggcaaaactaacatgaaacaaggctagaagtcaggtcggattaagccatagtacggaaaaaactatgctacctgtgagccccgtccaaggacgttaaaagaagtcaggccattacaaatgccatagcttgagtaaactgtgcagcctgtagctccacctgagaaggtgtaaaaaatctgggaggccacaaaccatggaagctgtacgcatggcgtagtggactagcggttagaggagacccctcccttacaaatcgcagcaacaatgggggcccaaggtgagatgaagctgtagtctcactggaaggactagaggttagaggagacccccccaaaacaaaaaacagcatattgacgctgggaaagaccagagatcctgctgtctcctcagcatcattccaggcacagaacgccagaaaatggaatggtgctgttgaatcaacaggttct

SEQ ID NO: 990 - DNA, 497 bp, Artificial Sequence
  Synthetic
gaaattaatacgactcactatagggagagattcaggaaggaggaggagtcagagggagccatttggtaaaagcaggaggcaaactgtcaggccaccttaagccacagtacggaagaagctgtgcagcctgtgagccccgtccaaggacgttaaaagaagaagtcaggcccaaaagccacggtttgagcaaaccgtgctgcctgtagctccgtcgtggggacgtaaagcctgggaggctgcaaaccgtggaagctgtacgcacggtgtagcagactagtggttagaggagacccctcccatgacacaacgcagcagcggggcccgagcactgagggaagctgtacctcctgcaaaggactagaggttataggagaccccccgcaaacaaaaacagcatattgacgctgggagagaccagagatcctgctgtctcctcagcatcattccaggcacagaacgccagaaaatggaatggtgctgttgaatcaacaggttct

SEQ ID NO: 991 - DNA, 498 bp, Artificial Sequence
  Synthetic
gaaattaatacgactcactatagggatctgatcggaaaagaggaatatgtggattacatgccagccatgaaaagatacagcgctcctttcgagagtgaaggagttctgtaattgttaacaacaaacaccaaagggaccattgaagtcaggccacttgtgccacggcttgagcaaaccgtgctgcctgtagctccgccaataatgggaggcgtaaaattcccagggaggccatgcgccacggaagctgtacgcgtggcatattggactagcggttagaggagacccctcccatcactgacaaaacgcagcaaaaaagggggcccgaagccaggaggaagctgtactcctggtggaaggactagaggttagaggagacccccccaacacaaaaacagcatattgacgctgggaaagaccagagatcctgctgtctctgcaacatcaatccaggcacagagcgccgcgagatggattggtgttgttgatccaacaggttct

SEQ ID NO: 992 - DNA, 425 bp, Artificial Sequence
  Synthetic
gaaattaatacgactcactatagggtacccagcaggaacttcaggatctccaatcctagacaagtgtgggagagtgataggactttatggcaatggggtcgtgatcaaaaatgggagttatgttagtgccatcacccaagggaggagggaggaagagactcctgttgagtgcttcgagccttcgatgctgaagaagaagcagctaactgtcttagacttgcatcctggagctgggaaaaccaggagagttcttcccgaaatagtccgtgaagccataaaaacaagactccgtactgtgatcttagctccaaccagggttgtcgctgctgaaatggaggaagcccttagagggcttccagtgcgttatatgacaacagcagtcaatgtcacccactctggaacagaaatcgtcgacttaatgtgcc

SEQ ID NO: 993 - DNA, 425 bp, Artificial Sequence
  Synthetic
gaaattaatacgactcactatagggtacccagcaggaacttcaggatctccaatcctagacaagtgtgggagagtgataggactttatggcaatggggtcgtgatcaaaaatgggagttatgttagtgccatcacccaagggaggagggaggaagagactcctgttgagtgcttcgagccttcgatgctgaagaagaagcagctaactgtcttagacttgcatcctggagctgggaaaaccaggagagttcttcccgaaatagtccgtgaagctataaaaacaagactccgtactgtgatcttagctccaaccagggttgtcgctgctgaaatggaggaagcccttagagggcttccagtgcgttatatgacaacagcagtcaatgtcacccactctggaacagaaatcgtcgacttaatgtgcc

SEQ ID NO: 994 - DNA, 425 bp, Artificial Sequence
  Synthetic
gaaattaatacgactcactatagggtgtgtacggaacctgccatcacaaaaaaggtgaagcacggagatctagaagagctgtgacgctcccctcccattccactaggaagctgcaaacgcggtcgcaaacctggttggaatcaagagaatacacaaagcacttgattagagtcgaaaattggatattcaggaaccctggcttcgcgttagcagcagctgccatcgcttggcttttgggaagctcaacgagccaaaaagtcatatacttggtcatgatactgctgattgccccggcatacagcatcaggtgcataggagtcagcaatagggactttgtggaaggtatgtcaggtgggacttgggttgatattgtcttggaacatggaggttgtgtcaccgtaatggcacaggacaaaccgactgtc

SEQ ID NO: 995 - DNA, 425 bp, Artificial Sequence
  Synthetic
gaaattaatacgactcactatagggtgtgtacggaacctgccatcacaaaaaaggtgaagcacggagatctagaagagctgtgacgctcccctcccattccactaggaagctgcaaacgcggtcgcaaacctggttggaatcaagagaatacacaaagcacttgattagagtcgaaaattggatattcaggaaccctggcttcgcgttagcagcagctgccatcgcttggcttttgggaagctcaacgagccaaaaagttatatacttggtcatgatactgctgattgccccggcatacagcatcaggtgcataggagtcagcaatagggactttgtggaaggtatgtcaggtgggacttgggttgatattgtcttggaacatggaggttgtgtcaccgtaatggcacaggacaaaccgactgtc

SEQ ID NO: 996 - DNA, 425 bp, Artificial Sequence
  Synthetic
gaaattaatacgactcactatagggtccccccgtagattggcagcagcagtcaagcaagcctgggaagatggtatctgcgggatctcctctgtttcaagaatggaaaacatcatgtggagatcagtagaaggggagctcaacgcaatcctggaagagaatggagttcaactgacggtcgttgtgggatctgtaaaaaaccccatgtggggaggtccacagagattgcccgtgcctgtgaacgagctgccccacggctggaaggcttgggggaaatcgcacttcgtcagagcagcaaagacaaataacagctttgtcgtggatggtgacacactgaaggaatgcccactcaaacatagagcatggaacagctttcttgtggaggatcatgggttcggggtatttcacactagtgtctggctcaagg

SEQ ID NO: 997 - DNA, 425 bp, Artificial Sequence
  Synthetic
gaaattaatacgactcactatagggtccccccgtagattggcagcagcagtcaagcaagcctgggaagatggtatctgcgggatctcctctgtttcaagaatggaaaacatcatgtggagatcagtagaaggggagctcaacgcaatcctggaagagaatggagttcaactgacggtcgttgtgggatctgtaaaaaaccccatgtggggagctccacagagattgcccgtgcctgtgaacgagctgccccacggctggaaggcttgggggaaatcgcacttcgtcagagcagcaaagacaaataacagctttgtcgtggatggtgacacactgaaggaatgcccactcaaacatagagcatggaacagctttcttgtggaggatcatgggttcggggtatttcacactagtgtctggctcaagg

SEQ ID NO: 998 - DNA, 425 bp, Artificial Sequence; identical to SEQ ID NO: 923
  Synthetic

SEQ ID NO: 999 - DNA, 493 bp, Artificial Sequence
  Synthetic
gaaattaatacgactcactatagggtcaaaaattgggcctgaaaatccatacaatactccagtatttgccataaagaaaaaagacagtactaaatggagaaaattagtagatttcagagaacttaataagagaactcaagacttctgggaagttcaattaggaataccacatcccgcagggttaaaaaagaaaaaatcagtaacagtactggatgtgggtgatgcatatttttcagttcccttagataaagacttcaggaagtatactgcatttaccatacctagtataaacaatgagacaccagggattagatatcagtacaatgtgcttccacagggatggaaaggatcaccagcaatattccaaagtagcatgacaaaaatcttagagccttttagaaaacaaaatccagacatagttatctatcaatacatggatgatttgtatgtaggatctgacttagaaatagggcagcatagaacaaaaatagag

SEQ ID NO: 1000 - DNA, 493 bp, Artificial Sequence; identical to SEQ ID NO: 999
  Synthetic

SEQ ID NO: 1001 - DNA, 493 bp, Artificial Sequence
  Synthetic
gaaattaatacgactcactatagggtcaaaaattgggcctgaaaatccatacaatactccagtatttgccataaagagaaaagacagtactaaatggagaaaattagtagatttcagagaacttaataagagaactcaagacttctgggaagttcaattaggaataccacatcccgcagggttaaaaaagaaaaaatcagtaacagtactggatgtgggtgatgcatatttttcagttcccttagataaagacttcaggaagtatactgcatttaccatacctagtataaacaatgagacaccagggattagatatcagtacaatgtgcttccacagggatggaaaggatcaccagcaatattccaaagtagcatgacaaaaatcttagagccttttagaaaacaaaatccagacatagttatctatcaatacatggatgatttgtatgtaggatctgacttagaaatagggcagcatagaacaaaaatagag

SEQ ID NO: 1002 - DNA, 493 bp, Artificial Sequence
  Synthetic
gaaattaatacgactcactatagggtcaaaaattgggcctgaaaatccatacaatactccagtatttgccataaagaaaaaagacagtactaaatggagaaaattagtagatttcagagaacttaataagagaactcaagacttctgggaagttcaattaggaataccacatcccgcagggttaaaaaagaacaaatcagtaacagtactggatgtgggtgatgcatatttttcagttcccttagataaagacttcaggaagtatactgcatttaccatacctagtataaacaatgagacaccagggattagatatcagtacaatgtgcttccacagggatggaaaggatcaccagcaatattccaaagtagcatgacaaaaatcttagagccttttagaaaacaaaatccagacatagttatctatcaatacatggatgatttgtatgtaggatctgacttagaaatagggcagcatagaacaaaaatagag

SEQ ID NO: 1003 - DNA, 493 bp, Artificial Sequence
  Synthetic
gaaattaatacgactcactatagggtcaaaaattgggcctgaaaatccatacaatactccagtatttgccataaagaaaaaagacagtactaaatggagaaaattagtagatttcagagaacttaataagagaactcaagacttctgggaagttcaattaggaataccacatcccgcagggttaaaaaagaaaaaatcaatgacagtactggatgtgggtgatgcatatttttcagttcccttagataaagacttcaggaagtatactgcatttaccatacctagtataaacaatgagacaccagggattagatatcagtacaatgtgcttccacagggatggaaaggatcaccagcaatattccaaagtagcatgacaaaaatcttagagccttttagaaaacaaaatccagacatagttatctatcaatacatggatgatttgtatgtaggatctgacttagaaatagggcagcatagaacaaaaatagag

SEQ ID NO: 1004 - DNA, 493 bp, Artificial Sequence
  Synthetic
gaaattaatacgactcactatagggtcaaaaattgggcctgaaaatccatacaatactccagtatttgccataaagaaaaaagacagtactaaatggagaaaattagtagatttcagagaacttaataagagaactcaagacttctgggaagttcaattaggaataccacatcccgcagggttaaaaaagaaaaaatcagtaacagtactggatgtgggtgatgcatatttttcagttcccttagataaagacttcaggaagtatactgcatttaccatacctagtataaacaatgagacaccagggattagatatcagtacaatgtgcttccacagggatggaaaggatcaccagcaatattccaaagtagcatgacaaaaatcttagagccttttagaaaacaaaatccagacatagttatctgtcaatacatggatgatttgtatgtaggatctgacttagaaatagggcagcatagaacaaaaatagag

SEQ ID NO: 1005 - DNA, 493 bp, Artificial Sequence
  Synthetic
gaaattaatacgactcactatagggtcaaaaattgggcctgaaaatccatacaatactccagtatttgccataaagaaaaaagacagtactaaatggagaaaattagtagatttcagagaacttaataagagaactcaagacttctgggaagttcaattaggaataccacatcccgcagggttaaaaaagaaaaaatcagtaacagtactggatgtgggtgatgcatatttttcagttcccttagataaagacttcaggaagtatactgcatttaccatacctagtataaacaatgagacaccagggattagatatcagtacaatgtgcttccacagggatggaaaggatcaccagcaatattccaaagtagcatgacaaaaatcttagagccttttagaaaacaaaatccagacatagttatctatcaatacgtggatgatttgtatgtaggatctgacttagaaatagggcagcatagaacaaaaatagag

SEQ ID NO: 1006 - DNA, 493 bp, Artificial Sequence
  Synthetic
gaaattaatacgactcactatagggtcaaaaattgggcctgaaaatccatacaatactccagtatttgccataaagaaaaaagacagtactaaatggagaaaattagtagatttcagagaacttaataagagaactcaagacttctgggaagttcaattaggaataccacatcccgcagggttaaaaaagaaaaaatcagtaacagtactggatgtgggtgatgcatatttttcagttcccttagataaagacttcaggaagtatactgcatttaccatacctagtataaacaatgagacaccagggattagatatcagtacaatgtgcttccacagggatggaaaggatcaccagcaatattccaaagtagcatgacaaaaatcttagagccttttagaaaacaaaatccagacatagttatctatcaatacatggatgatttgtatgtagcatctgacttagaaatagggcagcatagaacaaaaatagag

SEQ ID NO: 1007 - RNA, 14 nt, Artificial Sequence
  Synthetic
  misc_feature (1)..(1): 56-FAM
  misc_feature (14)..(14): 3Bio
uuuuuuuuuuuuuu

SEQ ID NO: 1008 - RNA, 36 nt, Artificial Sequence; identical to SEQ ID NO: 947
  Synthetic
